(19) United States
(12) Patent Application Publication
(10) Pub. No.: US 2008/0299659 A1
(43) Pub. Date: Dec. 4, 2008

(54) NUCLEIC ACID COMPOUNDS FOR INHIBITING APOB GENE EXPRESSION AND USES THEREOF

(75) Inventors: Steven C. Quay, Woodinville, WA (US); James McSwiggen, Bothell, WA (US); Narendra K. Vaish, Kirkland, WA (US); Mohammad Ahmadian, Bothell, WA (US)

Correspondence Address: NASTECH PHARMACEUTICAL COMPANY INC;MDRNA, Inc., 3830 MONTE VILLA PARKWAY, BOTHELL, WA, 98021-7266, US

(73) Assignee: NASTECH PHARMACEUTICAL COMPANY INC., Bothell, WA (US)

(21) Appl. No.: 12/039,668

(22) Filed: Feb. 28, 2008

Related U.S. Application Data
(60) Provisional application No. 60/934,940, filed on Mar. 2, 2007.
(60) Provisional application No. 60/934,930, filed on Mar. 16, 2007.
(60) Provisional application No. 60/992,975, filed on Dec. 6, 2007.

(51) Int. Cl. C12N 15/00; C07H 21/02

(52) U.S. Cl. 435/455; 536/23.1; 536/24.5

(57) ABSTRACT

The present disclosure provides meroduplex ribonucleic acid molecules (mdRNA) capable of decreasing or silencing ApoB gene expression. An mdRNA of this disclosure comprises at least three strands that combine to form at least two non-overlapping double-stranded regions separated by a nick or gap wherein one strand is complementary to an ApoB mRNA. In addition, the meroduplex may have at least one uridine substituted with a 5-methyluridine, a nucleoside replaced with a locked nucleic acid, or optionally other modifications, and any combination thereof. Also provided are methods of decreasing expression of an ApoB gene in a cell or in a subject to treat an ApoB-related disease.

### CROSS-REFERENCE TO RELATED APPLICATIONS

[0001] The present application claims priority to U.S. Provisional Patent Application Nos. 60/934,940, filed Mar. 2, 2007; 60/934,930, filed Mar. 16, 2007; and 60/992,975, filed Dec. 6, 2007, each of which is incorporated by reference in its entirety.

### TECHNICAL FIELD

[0002] The present disclosure relates generally to compounds for use in treating atherosclerosis, diabetes mellitus, and cerebrovascular disease by gene silencing and, more specifically, to a nicked or gapped double-stranded RNA (dsRNA) comprising at least three strands that decreases expression of an apolipoprotein B (including Ag(x) antigen) (ApoB) gene, and to uses of such dsRNA to treat or prevent atherosclerosis, diabetes mellitus, and cerebrovascular disease associated with inappropriate ApoB gene expression. The dsRNA that decreases ApoB gene expression may optionally have at least one uridine substituted with a 5-methyluridine.

### BACKGROUND

[0003] RNA interference (RNAi) refers to the cellular process of sequence specific, post-transcriptional gene silencing in animals mediated by small inhibitory nucleic acid molecules, such as a double-stranded RNA (dsRNA) that is homologous to a portion of a targeted messenger RNA (Fire et al., Nature 391:806, 1998; Hamilton et al., Science 286:950-951, 1999). RNAi has been observed in a variety of organisms, including mammalians (Fire et al., Nature 391:806, 1998; Bahramian and Zarbl, Mol. Cell. Biol. 19:274-283, 1999; Wianny and Goetz, Nature Cell Biol. 2:70, 1999). RNAi can be induced by introducing an exogenous synthetic 21-nucleotide RNA duplex into cultured mammalian cells (Elbashir et al., Nature 411:494, 2001a).

[0004] The mechanism by which dsRNA mediates targeted gene-silencing can be described as involving two steps. The first step involves degradation of long dsRNAs by a ribonuclease III-like enzyme, referred to as Dicer, into short interfering RNAs (siRNAs) having from 21 to 23 nucleotides with double-stranded regions of about 19 base pairs and a two nucleotide, generally, overhang at each 3′-end (Berstein et al., Nature 409:363, 2001; Elbashir et al., Genes Dev. 15:188, 2001b; and Kim et al., Nature Biotech. 23:222, 2005). The second step of RNAi gene-silencing involves activation of a multi-component nuclease having one strand (guide or antisense strand) from the siRNA and an Argonaute protein to form an RNA-induced silencing complex (“RISC”) (Elbashir et al., Genes Dev. 15:188, 2001). Argonaute initially associates with a double-stranded siRNA and then endonucleolytically cleaves the non-incorporated strand (passenger or sense strand) to facilitate its release due to resulting thermodynamic instability of the cleaved duplex (Leuschner et al., EMBO 7:314, 2006). The guide strand in the activated RISC binds to a complementary target mRNA and cleaves the mRNA to promote gene silencing. Cleavage of the target RNA occurs in the middle of the target region that is complementary to the guide strand (Elbashir et al., 2001b).

[0005] Apolipoprotein B (ApoB) is found in plasma as two main isoforms, ApoB-48 (intestinal) and ApoB-100 (hepatic). The intestinal and hepatic forms of ApoB are coded by a single gene, but the ApoB-48 is a shortened form of ApoB-100 that lacks the LDL-receptor region. ApoB-48 is a protein component of a chylomicron. Chylomicrons deliver dietary triacylglycerols to muscle and adipose tissue and dietary cholesterol to the liver (Voet and Voet, Biochemistry 2^{nd} Edition, New York: John Wiley & Sons, Inc., 1995, pages 319-323).

[0006] ApoB-100 is the chief protein component constituent of the atherogenic very-low-density lipoprotein (VLDL), intermediate-density lipoprotein (IDL), and low-density lipoprotein (LDL) particles, each particle including one ApoB molecule. In humans, VLDL particles carry endogenously synthesized triglyceride from the liver into plasma, where they undergo lipolysis to IDL by the action of lipoprotein lipase. IDL is lipolysed by hepatic lipase into LDL, which can be taken up by the liver via the LDL receptor. ApoB is also essential for the binding of LDL particles to the LDL receptor for cellular uptake and degradation of LDL particles (Chan and Watts, QJM 99:277, 2006).

[0007] There continues to be a need for alternative effective therapeutic modalities useful for treating or preventing ApoB-associated diseases or disorders in which reduced ApoB gene expression (gene silencing) would be beneficial. The present disclosure meets such needs, and further provides other related advantages.

### BRIEF SUMMARY

[0008] Briefly, the present disclosure provides nicked or gapped double-stranded RNA (dsRNA) comprising at least three strands that is suitable as a substrate for Dicer or as a RISC activator to modify expression of an apolipoprotein B (including Ag(x) antigen) (ApoB) messenger RNA (mRNA).

[0009] In one aspect, the instant disclosure provides a meroduplex mdRNA molecule, comprising a first strand that is complementary to a human ApoB mRNA as set forth in SEQ ID NO:1158, and a second strand and a third strand that are each complementary to non-overlapping regions of the first strand, wherein the second strand and third strands can anneal with the first strand to form at least two double-stranded regions spaced apart by up to 10 nucleotides and thereby forming a gap between the second and third strands, and wherein (a) the mdRNA molecule optionally includes at least one double-stranded region of 5 base pairs to 13 base pairs, or (b) the double-stranded regions combined total about 15 base pairs to about 40 base pairs and the mdRNA molecule optionally has blunt ends. In certain embodiments, the first strand is about 15 to about 40 nucleotides in length, and the second and third strands are each, individually, about 5 to about 20 nucleotides, wherein the combined length of the second and third strands is about 15 nucleotides to about 40 nucleotides. In other embodiments, the first strand is about 15 to about 40 nucleotides in length and is complementary to at least about 15, 19, 20, 21, 22, 23, 24, 25, 26, 27, 28, 29, 30, 35, or 40 contiguous nucleotides of a human ApoB mRNA as set forth in SEQ ID NO:1158. In still further embodiments, the first strand is about 15 to about 40 nucleotides in length and is at least about 70%, 75%, 80%, 85%, 90%, 95%, 96%, 97%, 98%, or 99% identical to a sequence that is complementary to at least about 15, 19, 20, 21, 22, 23, 24, 25, 26, 27, 28, 29, 30, 35, or 40 contiguous nucleotides of a human ApoB mRNA as set forth in SEQ ID NO:1158.

[0010] In other embodiments, the mdRNA is a RISC activator (e.g., the first strand has about 15 nucleotides to about 25 nucleotides) or a Dicer substrate (e.g., the first strand has about 26 nucleotides to about 40 nucleotides). In some embodiments, the gap comprises at least one to ten unpaired nucleotides in the first strand positioned between the double-stranded regions formed by the second and third strands when annealed to the first strand, or the gap is a nick. In certain embodiments, the nick or gap is located 10 nucleotides from the 5′-end of the first (antisense) strand or at the Argonaute cleavage site. In another embodiment, the meroduplex nick or gap is positioned such that the thermal stability is maximized for the first and second strand duplex and for the first and third strand duplex as compared to the thermal stability of such meroduplexes having a nick or gap in a different position.

[0011] In another aspect, the instant disclosure provides an mdRNA molecule having a first strand that is complementary to human ApoB mRNA as set forth in SEQ ID NO:1158, and a second strand and a third strand that is each complementary to non-overlapping regions of the first strand, wherein the second strand and third strand can anneal with the first strand to form at least two double-stranded regions spaced apart by up to 10 nucleotides and thereby forming a gap between the second and third strands, and wherein (a) the mdRNA molecule optionally includes at least one double-stranded region of 5 base pairs to 13 base pairs, or (b) the double-stranded regions combined total about 15 base pairs to about 40 base pairs and the mdRNA molecule optinally has blunt ends; and wherein at least one pyrimidine of the mdRNA comprises a pyrimidine nucleoside according to Formula I or II:

[chemical structure]

wherein R¹ and R² are each independently a —H, —OH, —OCH₃, —OCH₂OCH₂CH₃, —OCH₂CH₂OCH₃, halogen, substituted or unsubstituted C₁-C₁₀ alkyl, alkoxy, alkoxyalkyl, hydroxyalkyl, carboxyalkyl, alkylsulfonylamino, aminoalkyl, dialkylamino, alkylaminoalkyl, dialkylaminoalkyl, haloalkyl, trifluoromethyl, cycloalkyl, (cycloalkyl)alkyl, substituted or unsubstituted C₂-C₁₀ alkenyl, substituted or unsubstituted —O-allyl, —O—CH₂CH═CH₂, —O—CH═CHCH₃, substituted or unsubstituted C₂-C₁₀ alkynyl, carbamoyl, carbamyl, carboxy, carbonylamino, substituted or unsubstituted aryl, substituted or unsubstituted aralkyl, —NH₂, —NO₂, —C≡N, or heterocyclo group; R³ and R⁴ are each independently a hydroxyl, a protected hydroxyl, a phosphate, or an internucleoside linking group; and R⁵ and R⁸ are independently O or S. In certain embodiments, at least one nucleoside is according to Formula I in which R¹ is methyl and R² is —OH. In certain related embodiments, at least one uridine of the dsRNA molecule is replaced with a nucleoside according to Formula I in which R¹ is methyl and R² is —OH, or R¹ is methyl, R² is —OH, and R⁸ is S. In some embodiments, the at least one R¹ is a C₁-C₅ alkyl, such as methyl. In some embodiments, at least one R² is selected from 2′-O—(C₁-C₅) alkyl, 2′-O-methyl, 2′-OCH₂OCH₂CH₃, 2′-OCH₂CH₂OCH₃, 2′-O-allyl, or fluoro. In some embodiments, at least one pyrimidine nucleoside of the mdRNA molecule is a locked nucleic acid (LNA) in the form of a bicyclic sugar, wherein R² is oxygen, and the 2′-O and 4′-C form an oxymethylene bridge on the same ribose ring (e.g., a 5-methyluridine LNA) or is a G clamp. In other embodiments, one or more of the nucleosides are according to Formula I in which R¹ is methyl and R² is a 2′-O—(C₁-C₅) alkyl, such as 2′-O-methyl. In some embodiments, the gap comprises at least one unpaired nucleotide in the first strand positioned between the double-stranded regions formed by the second and third strands when annealed to the first strand, or the gap is a nick. In certain embodiments, the nick or gap is located 10 nucleotides from the 5′-end of the first strand or at the Argonaute cleavage site. In another embodiment, the meroduplex nick or gap is positioned such that the thermal stability is maximized for the first and second strand duplex and for the first and third strand duplex as compared to the thermal stability of such meroduplexes having a nick or gap in a different position.

[0012] In still another aspect, the instant disclosure provides a method for reducing the expression of a human ApoB gene in a cell, comprising administering an mdRNA molecule to a cell expressing an ApoB gene, wherein the mdRNA molecule is capable of specifically binding to an ApoB mRNA and thereby reducing the gene's level of expression in the cell. In a related aspect, there is provided a method of treating or preventing a disease associated with ApoB expression in a subject by administering an mdRNA molecule of this disclosure. In certain embodiments, the cell or subject is human. In certain embodiments, the disease is atherosclerosis, diabetes mellitus, or cerebrovascular disease.

[0013] In any of the aspects of this disclosure, some embodiments provide an mdRNA molecule having a 5-methyluridine (ribothymidine) or a 2-thioribothymidine or a 2′-O-methyl-5-methyluridine in place of at least one uridine on the first, second, or third strand, or in place of each and every uridine on the first, second, or third strand. In further embodiments, the mdRNA further comprises one or more non-standard nucleoside, such as a deoxyuridine, locked nucleic acid (LNA) molecule, or a universal-binding nucleotide, or a G clamp. Exemplary universal-binding nucleotides include C-phenyl, C-naphthyl, inosine, azole carboxamide, 1-β-D-ribofuranosyl-4-nitroindole, 1-β-D-ribofuranosyl-5-nitroindole, 1-β-D-ribofuranosyl-6-nitroindole, or 1-β-D-ribofuranosyl-3-nitropyrrole. In some embodiments, the mdRNA molecule further comprises a 2′-sugar substitution, such as a 2′-O-methyl, 2′-O-methoxyethyl, 2′-O-2-methoxyethyl, 2′-O-allyl, or halogen (e.g., 2′-fluoro). In certain embodiments, the mdRNA molecule further comprises a terminal cap substituent on one or both ends of one or more of the first strand, second strand, or third strand, such as independently an alkyl, abasic, deoxy abasic, glyceryl, dinucleotide, acyclic nucleotide, or inverted deoxynucleotide moiety. In other embodiments, the mdRNA molecule further comprises at least one modified internucleoside linkage, such as independently a phosphorothioate, chiral phosphorothioate, phosphorodithioate, phosphotriester, aminoalkylphosphotriester, methyl phosphonate, alkyl phosphonate, 3′-alkylene phosphonate, 5′-alkylene phosphonate, chiral phosphonate, phosphonoacetate, thiophosphonoacetate, phosphinate, phosphoramidate, 3′-amino phosphoramidate, aminoalkylphosphoramidate, thionophosphoramidate, thionoalkylphosphonate, thionoalkylphosphotriester, selenophosphate, or boranophosphate linkage.

[0014] In any of the aspects of this disclosure, some embodiments provide an mdRNA comprising an overhang of one to four nucleotides on at least one 3′-end that is not part of the gap, such as at least one deoxyribonucleotide or two deoxyribonucleotides (e.g., thymidine). In some embodiments, at least one or two 5′-terminal ribonucleotide of the second strand within the double-stranded region comprises a 2′-sugar substitution. In related embodiments, at least one or two 5′-terminal ribonucleotide of the first strand within the double-stranded region comprises a 2′-sugar substitution. In other related embodiments, at least one or two 5′-terminal ribonucleotide of the second strand and at least one or two 5′-terminal ribonucleotide of the first strand within the double-stranded regions comprise independent 2′-sugar substitutions. In other embodiments, the mdRNA molecule comprises at least three 5-methyluridines within at least one double-stranded region. In some embodiments, the mdRNA molecule has a blunt end at one or both ends. In other embodiments, the 5′-terminal of the third strand is a hydroxyl or a phosphate.

### BRIEF DESCRIPTION OF THE DRAWINGS

[0015] FIG. 1 shows the gene silencing activity of ten different APOB-specific nicked and gapped dsRNA Dicer substrate. This is the graphical representation of the data found in Table 1 (the Complex numbers on the x-axis correspond to the Set numbers for each of the ten different APOB dsRNA shown in Table 1).

[0016] FIG. 2 shows knockdown activity for RISC activator lacZ dsRNA (21 nucleotide sense strand/21 nucleotide antisense strand; 21/21), Dicer substrate lacZ dsRNA (25 nucleotide sense strand/27 nucleotide antisense strand; 25/27), and meroduplex lacZ mdRNA (13 nucleotide sense strand and 11 nucleotide sense strand/27 nucleotide antisense strand; 13, 11/27—the sense strand is missing one nucleotide so that a single nucleotide gap is left between the 13 nucleotide and 11 nucleotide sense strands when annealed to the 27 nucleotide antisense strand. Knockdown activities were normalized to a Qneg control dsRNA and presented as a normalized value of Qneg (i.e., Qneg represents 100% or “normal” gene expression levels). A smaller value indicates a greater knockdown effect.

[0017] FIG. 3 shows knockdown activity of a RISC activator influenza dsRNA G1498 (21/21) and nicked dsRNA (10, 11/21) at 100 nM. The “wt” designation indicates an unsubstituted RNA molecule; “rT” indicates RNA having each uridine substituted with a ribothymidine; and “p” indicates that the 5′-nucleotide of that strand was phosphorylated. The 21 nucleotide sense and antisense strands of G1498 were individually nicked between the nucleotides 10 and 11 as measured from the 5′-end, and is referred to as 11, 10/21 and 21/10, 11, respectively. The G1498 single stranded 21 nucleotide antisense strand alone (designated AS-only) was used as a control.

[0018] FIG. 4 shows knockdown activity of a lacZ dicer substrate (25/27) having a nick in one of each of positions 8 to 14 and a one nucleotide gap at position 13 of the sense strand (counted from the 5′-end). A dideoxy guanosine (ddG) was incorporated at the 5′-end of the 3′-most strand of the nicked or gapped sense sequence at position 13.

[0019] FIG. 5 shows knockdown activity of a dicer substrate influenza dsRNA G1498DS (25/27) and this sequence nicked at one of each of positions 8 to 14 of the sense strand, and shows the activity of these nicked molecules that are also phosphorylated or have a locked nucleic acid substitution.

[0020] FIG. 6 shows a dose dependent knockdown activity a dicer substrate influenza dsRNA G1498DS (25/27) and this sequence nicked at position 13 of the sense strand.

[0021] FIG. 7 shows knockdown activity of a dicer substrate influenza dsRNA G1498DS having a nick or a gap of one to six nucleotides that begins at any one of positions 8 to 12 of the sense strand.

[0022] FIG. 8 shows knockdown activity of a LacZ RISC dsRNA having a nick or a gap of one to six nucleotides that begins at any one of positions 8 to 14 of the sense strand.

[0023] FIG. 9 shows knockdown activity of an influenza RISC dsRNA having a nick at any one of positions 8 to 14 of the sense strand and further having one or two locked nucleic acids (LNA) per sense strand. The inserts on the right side of the graph provides a graphic depiction of the meroduplex structures (for clarity, a single antisense strand is shown at the bottom of the grouping with each of the different nicked sense strands above the antisense) having different nick positions with the relative positioning of the LNAs on the sense strands.

[0024] FIG. 10 shows knockdown activity of a LacZ dicer substrate dsRNA having a nick at any one of positions 8 to 14 of the sense strand as compared to the same nicked dicer substrates but having a locked nucleic acid substitution.

[0025] FIG. 11 shows the percent knockdown in influenza viral titers using influenza specific mdRNA against influenza strain WSN.

[0026] FIG. 12 shows the in vivo reduction in PR8 influenza viral titers using influenza specific mdRNA as measured by TCID₅₀.

### DETAILED DESCRIPTION

[0027] The instant disclosure is predicated upon the unexpected discovery that a nicked or gapped double-stranded RNA (dsRNA) comprising at least three strands is a suitable substrate for Dicer or RISC and, therefore, may be advantageously employed for gene silencing via, for example, the RNA interference pathway. That is, partially duplexed dsRNA molecules described herein (also referred to as meroduplexes having a nick or gap in at least one strand) are capable of initiating an RNA interference cascade that modifies (e.g., reduces) expression of a target messenger RNA (mRNA), such as a human apolipoprotein B (including Ag(x) antigen) (ApoB) mRNA. This is surprising because a person of skill in the art would expect the thermodynamically less stable nicked or gapped dsRNA passenger strand (as compared to an intact dsRNA) to fall apart before any gene silencing effect would result (see, e.g., Leuschner et al., EMBO 7:314, 2006).

[0028] Meroduplex ribonucleic acid (mdRNA) molecules described herein include a first (antisense) strand that is complementary to a human ApoB mRNA as set forth in SEQ ID NO:1158, along with second and third strands (together forming a gapped sense strand) that are each complementary to non-overlapping regions of the first strand, wherein the second and third strands can anneal with the first strand to form at least two double-stranded regions separated by a gap, and wherein at least one double-stranded region is optionally from about 5 base pairs to about 15 base pairs, or the combined double-stranded regions total about 15 base pairs to about 40 base pairs and the mdRNA is optionally blunt-ended. The gap can be from 0 nucleotides (i.e., a nick in which only a phosphodiester bond between two nucleotides is broken in a polynucleotide molecule) up to about 10 nucleotides (i.e., the first strand will have at least one unpaired nucleotide). In certain embodiments, the nick or gap is located 10 nucleotides from the 5′-end of the first (antisense) strand or at the Argonaute cleavage site. In another embodiment, the meroduplex nick or gap is positioned such that the thermal stability is maximized for the first and second strand duplex and for the first and third strand duplex as compared to the thermal stability of such meroduplexes having a nick or gap in a different position. Also provided herein are methods of using such dsRNA to reduce expression of an ApoB gene in a cell or to treat or prevent diseases or disorders associated with ApoB gene expression, including atherosclerosis, diabetes mellitus, and cerebrovascular disease.

[0029] Prior to introducing more detail to this disclosure, it may be helpful to an appreciation thereof to provide definitions of certain terms to be used herein.

[0030] In the present description, any concentration range, percentage range, ratio range, or integer range is to be understood to include the value of any integer within the recited range and, when appropriate, fractions thereof (such as one tenth and one hundredth of an integer), unless otherwise indicated. Also, any number range recited herein relating to any physical feature, such as polymer subunits, size or thickness, are to be understood to include any integer within the recited range, unless otherwise indicated. As used herein, “about” or “consisting essentially of” mean ±20% of the indicated range, value, or structure, unless otherwise indicated. As used herein, the terms “include” and “comprise” are open ended and are used synonymously. It should be understood that the terms “a” and “an” as used herein refer to “one or more” of the enumerated components. The use of the alternative (e.g., “or”) should be understood to mean either one, both, or any combination thereof of the alternatives.

[0031] As used herein, the term “isolated” means that the referenced material (e.g., nucleic acid molecules of the instant disclosure), is removed from its original environment, such as being separated from some or all of the co-existing materials in a natural environment (e.g., a natural environment may be a cell).

[0032] As used herein, “complementary” refers to a nucleic acid molecule that can form hydrogen bond(s) with another nucleic acid molecule or itself by either traditional Watson-Crick base pairing or other non-traditional types of pairing (e.g., Hoogsteen or reversed Hoogsteen hydrogen bonding) between complementary nucleosides or nucleotides. In reference to the nucleic molecules of the present disclosure, the binding free energy for a nucleic acid molecule with its complementary sequence is sufficient to allow the relevant function of the nucleic acid molecule to proceed, for example, RNAi activity, and there is a sufficient degree of complementarity to avoid non-specific binding of the nucleic acid molecule (e.g., dsRNA) to non-target sequences under conditions in which specific binding is desired, i.e., under physiological conditions in the case of in vivo assays or therapeutic treatment, or under conditions in which the assays are performed in the case of in vitro assays (e.g., hybridization assays). Determination of binding free energies for nucleic acid molecules is well known in the art (see, e.g., Turner et al., CSH Symp. Quant. Biol. LII:123, 1987; Frier et al., Proc. Nat'l. Acad. Sci. USA 83:9373, 1986; Turner et al., J. Am. Chem. Soc. 109:3783, 1987). Thus, “complementary” or “specifically hybridizable” or “specifically binds” are terms that indicate a sufficient degree of complementarity or precise pairing such that stable and specific binding occurs between a nucleic acid molecule (e.g., dsRNA) and a DNA or RNA target. It is understood in the art that a nucleic acid molecule need not be 100% complementary to a target nucleic acid sequence to be specifically hybridizable or to specifically bind. That is, two or more nucleic acid molecules may be less than fully complementary and is indicated by a percentage of contiguous residues in a nucleic acid molecule that can form hydrogen bonds with a second nucleic acid molecule.

[0033] For example, a first nucleic acid molecule may have 10 nucleotides and a second nucleic acid molecule may have 10 nucleotides, then base pairing of 5, 6, 7, 8, 9, or 10 nucleotides between the first and second nucleic acid molecules, which may or may not form a contiguous double-stranded region, represents 50%, 60%, 70%, 80%, 90%, and 100% complementarity, respectively. In certain embodiments, complementary nucleic acid molecules may have wrongly paired bases—that is, bases that cannot form a traditional Watson-Crick base pair or other non-traditional types of pair (i.e., “mismatched” bases). For instance, complementary nucleic acid molecules may be identified as having a certain number of “mismatches,” such as zero or about 1, about 2, about 3, about 4 or about 5.

[0034] “Perfectly” or “fully” complementary nucleic acid molecules means those in which a certain number of nucleotides of a first nucleic acid molecule hydrogen bond (anneal) with the same number of residues in a second nucleic acid molecule to form a contiguous double-stranded region. For example, two or more fully complementary nucleic acid molecule strands can have the same number of nucleotides (i.e., have the same length and form one double-stranded region, with or without an overhang) or have a different number of nucleotides (e.g., one strand may be shorter than but fully contained within another strand or one strand may overhang the other strand).

[0035] By “ribonucleic acid” or “RNA” is meant a nucleic acid molecule comprising at least one ribonucleotide molecule. As used herein, “ribonucleotide” refers to a nucleotide with a hydroxyl group at the 2′-position of a β-D-ribofuranose moiety. The term RNA includes double-stranded (ds) RNA, single-stranded (ss) RNA, isolated RNA (such as partially purified RNA, essentially pure RNA, synthetic RNA, recombinantly produced RNA), altered RNA (which differs from naturally occurring RNA by the addition, deletion, substitution or alteration of one or more nucleotides), or any combination thereof. For example, such altered RNA can include addition of non-nucleotide material, such as at one or both ends of an RNA molecule, internally at one or more nucleotides of the RNA, or any combination thereof. Nucleotides in RNA molecules of the instant disclosure can also comprise non-standard nucleotides, such as naturally occurring nucleotides, non-naturally occurring nucleotides, chemically-modified nucleotides, deoxynucleotides, or any combination thereof. These altered RNAs may be referred to as analogs or analogs of RNA containing standard nucleotides (i.e., standard nucleotides, as used herein, are considered to be adenine, cytidine, guanidine, thymidine, and uridine).

[0036] The term “dsRNA” as used herein, which is interchangeable with “mdRNA,” refers to any nucleic acid molecule comprising at least one ribonucleotide molecule and capable of inhibiting or down regulating gene expression, for example, by promoting RNA interference (“RNAi”) or gene silencing in a sequence-specific manner. The dsRNAs (mdRNAs) of the instant disclosure may be suitable substrates for Dicer or for association with RISC to mediate gene silencing by RNAi. Examples of dsRNA molecules of this disclosure are provided in the Sequence Listing identified herein. One or both strands of the dsRNA can further comprise a terminal phosphate group, such as a 5′-phosphate or 5′,3′-diphosphate. As used herein, dsRNA molecules, in addition to at least one ribonucleotide, can further include substitutions, chemically-modified nucleotides, and non-nucleotides. In certain embodiments, dsRNA molecules comprise ribonucleotides up to about 100% of the nucleotide positions.

[0037] In addition, as used herein, the term dsRNA is meant to be equivalent to other terms used to describe nucleic acid molecules that are capable of mediating sequence specific RNAi, for example, meroduplex RNA (mdRNA), nicked dsRNA (ndsRNA), gapped dsRNA (gdsRNA), short interfering nucleic acid (siNA), siRNA, micro-RNA (miRNA), short hairpin RNA (shRNA), short interfering oligonucleotide, short interfering substituted oligonucleotide, short interfering modified oligonucleotide, chemically-modified dsRNA, post-transcriptional gene silencing RNA (ptgsRNA), or the like. The term “large double-stranded RNA” (“large dsRNA”) refers to any double-stranded RNA longer than about 40 base pairs (bp) to about 100 bp or more, particularly up to about 300 bp to about 500 bp. The sequence of a large dsRNA may represent a segment of an mRNA or an entire mRNA. A double-stranded structure may be formed by a self-complementary nucleic acid molecule or by annealing of two or more distinct complementary nucleic acid molecule strands.

[0038] In one aspect, a dsRNA comprises two separate oligonucleotides, comprising a first strand (antisense) and a second strand (sense), wherein the antisense and sense strands are self-complementary (i.e., each strand comprises a nucleotide sequence that is complementary to a nucleotide sequence in the other strand and the two separate strands form a duplex or double-stranded structure, for example, wherein the double-stranded region is about 15 to about 24 base pairs or about 26 to about 40 base pairs); the antisense strand comprises a nucleotide sequence that is complementary to a nucleotide sequence in a target nucleic acid molecule or a portion thereof (e.g., a human ApoB mRNA of SEQ ID NO:1158); and the sense strand comprises a nucleotide sequence corresponding (i.e., homologous) to the target nucleic acid sequence or a portion thereof (e.g., a sense strand of about 15 to about 25 nucleotides or about 26 to about 40 nucleotides corresponds to the target nucleic acid or a portion thereof).

[0039] In another aspect, the dsRNA is assembled from a single oligonucleotide in which the self-complementary sense and antisense strands of the dsRNA are linked together by a nucleic acid based-linker or a non-nucleic acid-based linker. In certain embodiments, the first (antisense) and second (sense) strands of the dsRNA molecule are covalently linked by a nucleotide or non-nucleotide linker as described herein and known in the art. In other embodiments, a first dsRNA molecule is covalently linked to at least one second dsRNA molecule by a nucleotide or non-nucleotide linker known in the art, wherein the first dsRNA molecule can be linked to a plurality of other dsRNA molecules that can be the same or different, or any combination thereof. In another embodiment, the linked dsRNA may include a third strand that forms a meroduplex with the linked dsRNA.

[0040] In still another aspect, dsRNA molecules described herein form a meroduplex RNA (mdRNA) having three or more strands such as, for example, an ‘A’ (first or antisense) strand, ‘S1’ (second) strand, and ‘S2’ (third) strand in which the ‘S1’ and ‘S2’ strands are complementary to and form base pairs (bp) with non-overlapping regions of the ‘A’ strand (e.g., an mdRNA can have the form of A:S1S2). The double-stranded region formed by the annealing of the ‘S1’ and ‘A’ strands is distinct from and non-overlapping with the double-stranded region formed by the annealing of the ‘S2’ and ‘A’ strands. An mdRNA molecule is a “gapped” molecule, i.e., it contains a “gap” ranging from 0 nucleotides up to about 10 nucleotides (or a gap of 11, 12, 13, 14, 15, 16, 17, 18, 19, 20, 21, 22, 23, 24, 25, 26, 27, 28, 29, 30, 31, 32, 33, 34 or 35 nucleotides). In one embodiment, the A:S1 duplex is separated from the A:S2 duplex by a gap resulting from at least one unpaired nucleotide (up to about 10 unpaired nucleotides) in the ‘A’ strand that is positioned between the A:S1 duplex and the A:S2 duplex and that is distinct from any one or more unpaired nucleotide at the 3′-end of one or more of the ‘A’, ‘S1’, or ‘S2’ strands. In another embodiment, the A:S1 duplex is separated from the A:S2 duplex by a gap of zero nucleotides (i.e., a nick in which only a phosphodiester bond between two nucleotides is broken or missing in the polynucleotide molecule) between the A:S1 duplex and the A:S2 duplex—which can also be referred to as nicked dsRNA (ndsRNA). For example, A:S1S2 may be comprised of a dsRNA having at least two double-stranded regions that combined total about 14 base pairs to about 40 base pairs and the double-stranded regions are separated by a gap of 0, 1, 2, 3, 4, 5, 6, 7, 8, 9, 10, 11, 12, 13, 14, 15, 16, 17, 18, 19, 20, 21, 22, 23, 24, 25, 26, 27, 28, 29, 30, 31, 32, 33, 34 or 35 nucleotides, optionally having blunt ends, or A:S1S2 may comprise a dsRNA having at least two double-stranded regions spaced apart by up to 10 nucleotides and thereby forming a gap between the second and third strands wherein at least one of the double-stranded regions optionally has from 5 base pairs to 13 base pairs.

[0041] A dsRNA or large dsRNA may include a substitution or modification in which the substitution or modification may be in a phosphate backbone bond, a sugar, a base, or a nucleoside. Such nucleoside substitutions can include natural non-standard nucleosides (e.g., 5-methyluridine or 5-methylcytidine or a 2-thioribothymidine), and such backbone, sugar, or nucleoside modifications can include an alkyl or heteroatom substitution or addition, such as a methyl, alkoxyalkyl, halogen, nitrogen or sulfur, or other modifications known in the art.

[0042] In addition, as used herein, the term “RNAi” is meant to be equivalent to other terms used to describe sequence specific RNA interference, such as post transcriptional gene silencing, translational inhibition, or epigenetics. For example, dsRNA molecules of this disclosure can be used to epigenetically silence genes at the post-transcriptional level or the pre-transcriptional level or any combination thereof.

[0043] As used herein, “target nucleic acid” refers to any nucleic acid sequence whose expression or activity is to be altered (e.g., ApoB). The target nucleic acid can be DNA, RNA, or analogs thereof, and includes single, double, and multi-stranded forms. By “target site” or “target sequence” is meant a sequence within a target nucleic acid (e.g., mRNA) that, when present in an RNA molecule, is “targeted” for cleavage by RNAi and mediated by a dsRNA construct of this disclosure containing a sequence within the antisense strand that is complementary to the target site or sequence.

[0044] As used herein, “off-target effect” or “off-target profile” refers to the observed altered expression pattern of one or more genes in a cell or other biological sample not targeted, directly or indirectly, for gene silencing by an mdRNA or dsRNA. For example, an off-target effect can be quantified by using a DNA microarray to determine how many non-target genes have an expression level altered by about two-fold or more in the presence of a candidate mdRNA or dsRNA, or analog thereof specific for a target sequence, such as an ApoB mRNA. A “minimal off-target effect” means that an mdRNA or dsRNA affects expression by about two-fold or more of about 25% to about 1% of the non-target genes examined or it means that the off-target effect of substituted or modified mdRNA or dsRNA (e.g., having at least one uridine substituted with a 5-methyluridine or 2-thioribothymidine and optionally having at least one nucleotide modified at the 2′-position), is reduced by at least about 1% to about 80% or more as compared to the effect on non-target genes of an unsubstituted or unmodified mdRNA or dsRNA.

[0045] By “sense region” or “sense strand” is meant one or more nucleotide sequences of a dsRNA molecule having complementarity to one or more antisense regions of the dsRNA molecule. In addition, the sense region of a dsRNA molecule comprises a nucleic acid sequence having homology or identity to a target sequence, such as ApoB. By “antisense region” or “antisense strand” is meant a nucleotide sequence of a dsRNA molecule having complementarity to a target nucleic acid sequence, such as ApoB. In addition, the antisense region of a dsRNA molecule can comprise nucleic acid sequence region having complementarity to one or more sense strands of the dsRNA molecule.

[0046] “Analog” as used herein refers to a compound that is structurally similar to a parent compound (e.g., a nucleic acid molecule), but differs slightly in composition (e.g., one atom or functional group is different, added, or removed). The analog may or may not have different chemical or physical properties than the original compound and may or may not have improved biological or chemical activity. For example, the analog may be more hydrophilic or it may have altered activity as compared to a parent compound. The analog may mimic the chemical or biological activity of the parent compound (i.e., it may have similar or identical activity), or, in some cases, may have increased or decreased activity. The analog may be a naturally or non-naturally occurring (e.g., chemically-modified or recombinant) variant of the original compound. An example of an RNA analog is an RNA molecule having a non-standard nucleotide, such as 5-methyuridine or 5-methylcytidine or 2-thioribothymidine, which may impart certain desirable properties (e.g., improve stability, bioavailability, minimize off-target effects or interferon response).

[0047] As used herein, the term “universal base” refers to nucleotide base analogs that form base pairs with each of the standard DNA/RNA bases with little discrimination between them. A universal base is thus interchangeable with all of the standard bases when substituted into a nucleotide duplex (see, e.g., Loakes et al., J. Mol. Bio. 270:426, 1997). Examplary universal bases include C-phenyl, C-naphthyl and other aromatic derivatives, inosine, azole carboxamides, or nitroazole derivatives such as 3-nitropyrrole, 4-nitroindole, 5-nitroindole, and 6-nitroindole (see, e.g., Loakes, Nucleic Acids Res. 29:2437, 2001).

[0048] The term “gene” as used herein, especially in the context of “target gene” or “gene target” for RNAi, means a nucleic acid molecule that encodes an RNA or a transcription product of such gene, including a messenger RNA (mRNA, also referred to as structural genes that encode for a polypeptide), an mRNA splice variant of such gene, a functional RNA (fRNA), or non-coding RNA (ncRNA), such as small temporal RNA (stRNA), microRNA (miRNA), small nuclear RNA (snRNA), short interfering RNA (siRNA), small nucleolar RNA (snRNA), ribosomal RNA (rRNA), transfer RNA (tRNA) and precursor RNAs thereof. Such non-coding RNAs can serve as target nucleic acid molecules for dsRNA mediated RNAi to alter the activity of the target RNA involved in functional or regulatory cellular processes.

[0049] As used herein, “gene silencing” refers to a partial or complete loss-of-function through targeted inhibition of gene expression in a cell, which may also be referred to as RNAi “knockdown,” “inhibition,” “down-regulation,” or “reduction” of expression of a target gene, such as a human ApoB gene. Depending on the circumstances and the biological problem to be addressed, it may be preferable to partially reduce gene expression. Alternatively, it might be desirable to reduce gene expression as much as possible. The extent of silencing may be determined by methods described herein and known in the art (see, e.g., PCT Publication No. WO 99/32619; Elbashir et al., EMBO J. 20:6877, 2001). Depending on the assay, quantification of gene expression permits detection of various amounts of inhibition that may be desired in certain embodiments of this disclosure, including prophylactic and therapeutic methods, which will be capable of knocking down target gene expression, in terms of mRNA level or protein level or activity, for example, by equal to or greater than 10%, 30%, 50%, 75% 90%, 95% or 99% of baseline (i.e., normal) or other control levels, including elevated expression levels as may be associated with particular disease states or other conditions targeted for therapy.

[0050] As used herein, the term “therapeutically effective amount” means an amount of dsRNA that is sufficient to result in a decrease in severity of disease symptoms, an increase in frequency or duration of disease symptom-free periods, or a prevention of impairment or disability due to the disease, in the subject (e.g., human) to which it is administered. For example, a therapeutically effective amount of dsRNA directed against an mRNA of ApoB (e.g., SEQ ID NO:1158) can inhibit the deposition of lipoproteins in the walls of arteries by at least about 20%, at least about 40%, at least about 60%, or at least about 80% relative to untreated subjects. A therapeutically effective amount of a therapeutic compound can decrease, for example, atheromatous plaque size or otherwise ameliorate symptoms in a subject. One of ordinary skill in the art would be able to determine such therapeutically effective amounts based on such factors as the subject's size, the severity of symptoms, and the particular composition or route of administration selected. The nucleic acid molecules of the instant disclosure, individually, or in combination or in conjunction with other drugs, can be used to treat diseases or conditions discussed herein. For example, to treat a particular disease, disorder, or condition, the dsRNA molecules can be administered to a patient or can be administered to other appropriate cells evident to those skilled in the art, individually or in combination with one or more drugs, under conditions suitable for treatment.

[0051] In addition, one or more dsRNA may be used to knockdown expression of an ApoB mRNA as set forth in SEQ ID NO:1158, or a related mRNA splice variant. In this regard it is noted that an ApoB gene may be transcribed into two or more mRNA splice variants; and thus, for example, in certain embodiments, knockdown of one mRNA splice variant without affecting the other mRNA splice variant may be desired, or vice versa; or knockdown of all transcription products may be targeted.

[0052] In addition, it should be understood that the individual compounds, or groups of compounds, derived from the various combinations of the structures and substituents described herein, are disclosed by the present application to the same extent as if each compound or group of compounds was set forth individually. Thus, selection of particular structures or particular substituents is within the scope of the present disclosure. As described herein, all value ranges are inclusive over the indicated range. Thus, a range of C₁-C₄ will be understood to include the values of 1, 2, 3, and 4, such that C₁, C₂, C₃ and C₄ are included.

[0053] The term “alkyl” as used herein refers to saturated straight- or branched-chain aliphatic groups containing from 1-20 carbon atoms, preferably 1-8 carbon atoms and most preferably 1-4 carbon atoms. This definition applies as well to the alkyl portion of alkoxy, alkanoyl and aralkyl groups. The alkyl group may be substituted or unsubstituted. In certain embodiments, the alkyl is a (C₁-C₄) alkyl or methyl.

[0054] The term “cycloalkyl” as used herein refers to a saturated cyclic hydrocarbon ring system containing from 3 to 12 carbon atoms that may be optionally substituted. Exemplary embodiments include, but are not limited to, cyclopropyl, cyclobutyl, cyclopentyl and cyclohexyl. In certain embodiments, the cycloalkyl group is cyclopropyl. In another embodiment, the (cycloalkyl)alkyl groups contain from 3 to 12 carbon atoms in the cyclic portion and 1 to 6 carbon atoms in the alkyl portion. In certain embodiments, the (cycloalkyl)alkyl group is cyclopropylmethyl. The alkyl groups are optionally substituted with from one to three substituents selected from the group consisting of halogen, hydroxy and amino.

[0055] The terms “alkanoyl” and “alkanoyloxy” as used herein refer, respectively, to —C(O)-alkyl groups and —O—C(═O)— alkyl groups, each optionally containing 2 to 10 carbon atoms. Specific embodiments of alkanoyl and alkanoyloxy groups are acetyl and acetoxy, respectively.

[0056] The term “alkenyl” refers to an unsaturated branched, straight-chain or cyclic alkyl group having 2 to 15 carbon atoms and having at least one carbon-carbon double bond derived by the removal of one hydrogen atom from a single carbon atom of a parent alkene. The group may be in either the cis or trans conformation about the double bond(s). Certain embodiments include ethenyl, 1-propenyl, 2-propenyl, 1-methylethenyl, 1-butenyl, 2-butenyl, 3-butenyl, 2-methyl-2-propenyl, 1-pentenyl, 2-pentenyl, 4-pentenyl, 3-methyl-2-butenyl, 1-hexenyl, 2-hexenyl, 1-heptenyl, 2-heptenyl, 1-octenyl, 2-octenyl, 1,3-octadienyl, 2-nonenyl, 1,3-nonadienyl, 2-decenyl, etc., or the like. The alkenyl group may be substituted or unsubstituted.

[0057] The term “alkynyl” as used herein refers to an unsaturated branched, straight-chain, or cyclic alkyl group having 2 to 10 carbon atoms and having at least one carbon-carbon triple bond derived by the removal of one hydrogen atom from a single carbon atom of a parent alkyne. Exemplary alkynyls include ethynyl, 1-propynyl, 2-propynyl, 1-butynyl, 2-butynyl, 3-butynyl, 1-pentynyl, 2-pentynyl, 4-pentynyl, 1-octynyl, 6-methyl-1-heptynyl, 2-decynyl, or the like. The alkynyl group may be substituted or unsubstituted.

[0058] The term “hydroxyalkyl” alone or in combination, refers to an alkyl group as previously defined, wherein one or several hydrogen atoms, preferably one hydrogen atom has been replaced by a hydroxyl group. Examples include hydroxymethyl, hydroxyethyl and 2-hydroxyethyl.

[0059] The term “aminoalkyl” as used herein refers to the group —NRR′, where R and R′ may independently be hydrogen or (C₁-C₄) alkyl.

[0060] The term “alkylaminoalkyl” refers to an alkylamino group linked via an alkyl group (i.e., a group having the general structure -alkyl-NH-alkyl or -alkyl-N(alkyl)(alkyl)). Such groups include, but are not limited to, mono- and di-(C₁-C₈ alkyl)aminoC₁-C₈ alkyl, in which each alkyl may be the same or different.

[0061] The term “dialkylaminoalkyl” refers to alkylamino groups attached to an alkyl group. Examples include, but are not limited to, N,N-dimethylaminomethyl, N,N-dimethylaminoethyl N,N-dimethylaminopropyl, and the like. The term dialkylaminoalkyl also includes groups where the bridging alkyl moiety is optionally substituted.

[0062] The term “haloalkyl” refers to an alkyl group substituted with one or more halo groups, for example chloromethyl, 2-bromoethyl, 3-iodopropyl, trifluoromethyl, perfluoropropyl, 8-chlorononyl, or the like.

[0063] The term “carboxyalkyl” as used herein refers to the substituent —R¹⁰—COOH, wherein R¹⁰ is alkylene; and “carbalkoxyalkyl” refers to —R¹⁰—C(═O)OR¹¹, wherein R¹⁰ and R¹¹ are alkylene and alkyl respectively. In certain embodiments, alkyl refers to a saturated straight- or branched-chain hydrocarbyl radical of 1 to 6 carbon atoms such as methyl, ethyl, n-propyl, isopropyl, n-butyl, t-butyl, n-pentyl, 2-methylpentyl, n-hexyl, and so forth. Alkylene is the same as alkyl except that the group is divalent.

[0064] The term “alkoxy” includes substituted and unsubstituted alkyl, alkenyl, and alkynyl groups covalently linked to an oxygen atom. In one embodiment, the alkoxy group contains 1 to about 10 carbon atoms. Embodiments of alkoxy groups include, but are not limited to, methoxy, ethoxy, isopropyloxy, propoxy, butoxy, and pentoxy groups. Embodiments of substituted alkoxy groups include halogenated alkoxy groups. In a further embodiment, the alkoxy groups can be substituted with groups such as alkenyl, alkynyl, halogen, hydroxyl, alkylcarbonyloxy, arylcarbonyloxy, alkoxycarbonyloxy, aryloxycarbonyloxy, carboxylate, alkylcarbonyl, arylcarbonyl, alkoxycarbonyl, aminocarbonyl, alkylaminocarbonyl, dialkylaminocarbonyl, alkylthiocarbonyl, alkoxyl, phosphate, phosphonato, phosphinato, cyano, amino (including alkylamino, dialkylamino, arylamino, diarylamino, and alkylarylamino), acylamino (including alkylcarbonylamino, arylcarbonylamino, carbamoyl and ureido), amidino, imino, sulfhydryl, alkylthio, arylthio, thiocarboxylate, sulfates, alkylsulfinyl, sulfonato, sulfamoyl, sulfonamido, nitro, trifluoromethyl, cyano, azido, heterocyclyl, alkylaryl, or an aromatic or heteroaromatic moieties. Exemplary halogen substituted alkoxy groups include, but are not limited to, fluoromethoxy, difluoromethoxy, trifluoromethoxy, chloromethoxy, dichloromethoxy, and trichloromethoxy.

[0065] The term “alkoxyalkyl” refers to an alkylene group substituted with an alkoxy group. For example, methoxyethyl (CH₃OCH₂CH₂—) and ethoxymethyl (CH₃CH₂OCH₂—) are both C₃ alkoxyalkyl groups.

[0066] The term “aryl” as used herein refers to monocyclic or bicyclic aromatic hydrocarbon groups having from 6 to 12 carbon atoms in the ring portion, for example, phenyl, naphthyl, biphenyl and diphenyl groups, each of which may be substituted with, for example, one to four substituents such as alkyl; substituted alkyl as defined above, halogen, trifluoromethyl, trifluoromethoxy, hydroxy, alkoxy, cycloalkyloxy, alkanoyl, alkanoyloxy, amino, alkylamino, dialkylamino, nitro, cyano, carboxy, carboxyalkyl, carbamyl, carbamoyl and aryloxy. Specific embodiments of aryl groups in accordance with the present disclosure include phenyl, substituted phenyl, naphthyl, biphenyl, and diphenyl.

[0067] The term “aroyl,” as used alone or in combination herein, refers to an aryl radical derived from an aromatic carboxylic acid, such as optionally substituted benzoic or naphthoic acids.

[0068] The term “aralkyl” as used herein refers to an aryl group bonded to the 2-pyridinyl ring or the 4-pyridinyl ring through an alkyl group, preferably one containing 1 to 10 carbon atoms. A preferred aralkyl group is benzyl.

[0069] The term “carboxy,” as used herein, represents a group of the formula —C(═O)OH or —C(═O)O⁻.

[0070] The term “carbonyl” as used herein refers to a group in which an oxygen atom is double-bonded to a carbon atom —C═O.

[0071] The term “trifluoromethyl” as used herein refers to —CF₃.

[0072] The term “trifluoromethoxy” as used herein refers to —OCF₃.

[0073] The term “hydroxyl” as used herein refers to —OH or —O⁻.

[0074] The term “nitrile” or “cyano” as used herein refers to the group —CN.

[0075] The term “nitro,” as used herein alone or in combination refers to a —NO₂ group.

[0076] The term “amino” as used herein refers to the group —NR⁹R⁹, wherein R⁹ may independently be hydrogen, alkyl, aryl, alkoxy, or heteroaryl. The term “aminoalkyl” as used herein represents a more detailed selection as compared to “amino” and refers to the group —NR′R′, wherein R′ may independently be hydrogen or (C₁-C₄) alkyl. The term “dialkylamino” refers to an amino group having two attached alkyl groups that can be the same or different.

[0077] The term “alkanoylamino” refers to alkyl, alkenyl or alkynyl groups containing the group —C(═O)— followed by —N(H)—, for example acetylamino, propanoylamino and butanoylamino and the like.

[0078] The term “carbonylamino” refers to the group —NR′-CO—CH₂—R′, wherein R′ may be independently selected from hydrogen or (C₁-C₄) alkyl.

[0079] The term “carbamoyl” as used herein refers to —O—C(O)NH₂.

[0080] The term “carbamyl” as used herein refers to a functional group in which a nitrogen atom is directly bonded to a carbonyl, i.e., as in —NR″C(═O)R″ or —C(═O)NR″R″, wherein R″ can be independently hydrogen, alkyl, substituted alkyl, alkenyl, substituted alkenyl, alkoxy, cycloalkyl, aryl, heterocyclo, or heteroaryl.

[0081] The term “alkylsulfonylamino” refers to the group —NHS(O)₂R¹², wherein R¹² is alkyl.

[0082] The term “halogen” as used herein refers to bromine, chlorine, fluorine or iodine. In one embodiment, the halogen is fluorine. In another embodiment, the halogen is chlorine.

[0083] The term “heterocyclo” refers to an optionally substituted, unsaturated, partially saturated, or fully saturated, aromatic or nonaromatic cyclic group that is a 4 to 7 membered monocyclic, or 7 to 11 membered bicyclic ring system that has at least one heteroatom in at least one carbon atom-containing ring. The substituents on the heterocyclo rings may be selected from those given above for the aryl groups. Each ring of the heterocyclo group containing a heteroatom may have 1, 2, or 3 heteroatoms selected from nitrogen, oxygen or sulfur. Plural heteroatoms in a given heterocyclo ring may be the same or different.

[0084] Exemplary monocyclic heterocyclo groups include pyrrolidinyl, pyrrolyl, indolyl, pyrazolyl, imidazolyl, oxazolyl, isoxazolyl, thiazolyl, furyl, tetrahydrofuryl, thienyl, piperidinyl, piperazinyl, azepinyl, pyrimidinyl, pyridazinyl, tetrahydropyranyl, morpholinyl, dioxanyl, triazinyl and triazolyl. Preferred bicyclic heterocyclo groups include benzothiazolyl, benzoxazolyl, benzothienyl, quinolinyl, tetrahydroisoquinolinyl, benzimidazolyl, benzofuryl, indazolyl, benzisothiazolyl, isoindolinyl and tetrahydroquinolinyl. In more detailed embodiments heterocyclo groups may include indolyl, imidazolyl, furyl, thienyl, thiazolyl, pyrrolidyl, pyridyl and pyrimidyl.

[0085] “Substituted” refers to a group in which one or more hydrogen atoms are each independently replaced with the same or different substituent(s). Representative substituents include —X, —R⁶, —O—, ═O, —OR, —SR⁶, —S—, ═S, —NR⁶R⁶, ═NR⁶, —CX₃, —CF₃, —CN, —OCN, —SCN, —NO, —NO₂, ═N₂, —N₃, —S(═O)₂O—, —S(═O)₂OH, —S(═O)₂R⁶, —OS(═O)₂O—, —OS(═O)₂OH, —OS(═O)₂R⁶, —P(═O)(O⁻)₂, —P(═O)(OH)(O⁻), —OP(═O)₂(O⁻), —C(—O)R⁶, —C(═S)R⁶, —C(═O)OR⁶, —C(═O)O⁻, —C(═S)OR⁶, —NR⁶—C(═O)—N(R⁶)₂, —NR⁶—C(═S)—N(R⁶)₂, and —C(═NR⁶)NR⁶R⁶, wherein each X is independently a halogen; and each R⁶ is independently hydrogen, halogen, alkyl, aryl, arylalkyl, arylaryl, arylheteroalkyl, heteroaryl, heteroarylalkyl, NR⁷R⁷, —C(═O)R⁷, and —S(═O)₂R⁷; and each R⁷ is independently hydrogen, alkyl, alkanyl, alkynyl, aryl, arylalkyl, arylheteralkyl, arylaryl, heteroaryl or heteroarylalkyl. Aryl containing substituents, whether or not having one or more substitutions, may be attached in a para (p-), meta (m-) or ortho (o-) conformation, or any combination thereof.

Apolipoprotein B (Including Ag(x) Antigen) (ApoB) and Exemplary dsRNA Molecules

[0086] The products of the apolipoprotein B (including Ag(x) antigen) gene (ApoB; also known as FLDB) are central players in the transport of exdogenous and endogenous lipids. Mutation or overexpression of ApoB that increases activity is associated with a variety of disorders including, for example, atherosclerosis, diabetes mellitus, and cerebrovascular disease.

[0087] More detail regarding ApoB and related disorders are described at www.ncbi.nlm.nih.gov/entrez/queryfcgi?db=OMIM, which is in the Online Mendelian Inheritance in Man database (OMIM Accession No. 107730). The complete mRNA sequence for human ApoB has Genbank accession number NM_{—}000384.2 (SEQ ID NO:1158). As used herein, reference to ApoB mRNA or RNA sequences or sense strands means an ApoB RNA isoform as set forth in SEQ ID NO:1158, as well as variants and homologs having at least 80% or more identity with human ApoB mRNA sequence as set forth in SEQ ID NO:11158.

[0088] The “percent identity” between two or more nucleic acid sequences is a function of the number of identical positions shared by the sequences (i.e., % identity=number of identical positions/total number of positions×100), taking into account the number of gaps, and the length of each gap that needs to be introduced to optimize alignment of two or more sequences. The comparison of sequences and determination of percent identity between two or more sequences can be accomplished using a mathematical algorithm, such as BLAST and Gapped BLAST programs at their default parameters (e.g., BLASTN, see www.ncbi.nlm.nih.gov/BLAST; see also Altschul et al., J. Mol. Biol. 215:403-410, 1990).

[0089] In one aspect, the instant disclosure provides an mdRNA molecule, comprising a first strand that is complementary to ApoB mRNA as set forth in SEQ ID NO:1158, and a second strand and a third strand that are each complementary to non-overlapping regions of the first strand, wherein the second strand and third strands can anneal with the first strand to form at least two double-stranded regions spaced apart by up to 10 nucleotides and thereby forming a gap between the second and third strands, and wherein (a) the mdRNA molecule optionally has at least one double-stranded region of 5 base pairs to 13 base pairs, or (b) the combined double-stranded regions total about 15 base pairs to about 40 base pairs and the mdRNA molecule optinally has blunt ends; wherein at least one pyrimidine of the mdRNA is substituted with a pyrimidine nucleoside according to Formula I or II:

[chemical structure]

wherein R¹ and R² are each independently a —H, —OH, —OCH₃, —OCH₂OCH₂CH₃, —OCH₂CH₂OCH₃, halogen, substituted or unsubstituted C₁-C₁₀ alkyl, alkoxy, alkoxyalkyl, hydroxyalkyl, carboxyalkyl, alkylsulfonylamino, aminoalkyl, dialkylamino, alkylaminoalkyl, dialkylaminoalkyl, haloalkyl, trifluoromethyl, cycloalkyl, (cycloalkyl)alkyl, substituted or unsubstituted C₂-C₁₀ alkenyl, substituted or unsubstituted —O-allyl, —O—CH₂CH═CH₂, —O—CH═CHCH₃, substituted or unsubstituted C₂-C₁₀ alkynyl, carbamoyl, carbamyl, carboxy, carbonylamino, substituted or unsubstituted aryl, substituted or unsubstituted aralkyl, —NH₂, —NO₂, —C≡N, or heterocyclo group; R³ and R⁴ are each independently a hydroxyl, a protected hydroxyl, a phosphate, or an internucleoside linking group; and R⁵ and R⁸ are each independently O or S. In certain embodiments, at least one nucleoside is according to Formula I in which R¹ is methyl and R² is —OH, or R¹ is methyl, R² is —OH, and R⁸ is S. In other embodiments, the internucleoside linking group covalently links from about 5 to about 40 nucleosides. In some embodiments, the gap comprises at least one unpaired nucleotide in the first strand positioned between the double-stranded regions formed by the second and third strands when annealed to the first strand, or the gap is a nick. In certain embodiments, the nick or gap is located 10 nucleotides from the 5′-end of the first (antisense) strand or at the Argonaute cleavage site. In another embodiment, the meroduplex nick or gap is positioned such that the thermal stability is maximized for the first and second strand duplex and for the first and third strand duplex as compared to the thermal stability of such meroduplexes having a nick or gap in a different position.

[0090] In still another aspect, the instant disclosure provides an mdRNA molecule, comprising a first strand that is complementary to apolipoprotein B (including Ag(x) antigen) (ApoB) mRNA as set forth in SEQ ID NO:1158, and a second strand and a third strand that are each complementary to non-overlapping regions of the first strand, wherein the second strand and third strands can anneal with the first strand to form at least two double-stranded regions spaced apart by up to 10 nucleotides and thereby forming a gap between the second and third strands, and wherein the mdRNA molecule optionally includes at least one double-stranded region of 5 base pairs to 13 base pairs. In a further aspect, the instant disclosure provides an mdRNA molecule having a first strand that is complementary to an ApoB mRNA as set forth in SEQ ID NO:1158, and a second strand and a third strand that are each complementary to non-overlapping regions of the first strand, wherein the second strand and third strands can anneal with the first strand to form at least two double-stranded regions spaced apart by up to 10 nucleotides and thereby forming a gap between the second and third strands, and wherein the combined double-stranded regions total about 15 base pairs to about 40 base pairs and the mdRNA molecule optinally has blunt ends. In some embodiments, the gap comprises at least one unpaired nucleotide in the first strand positioned between the double-stranded regions formed by the second and third strands when annealed to the first strand, or the gap is a nick. In certain embodiments, the nick or gap is located 10 nucleotides from the 5′-end of the first (antisense) strand or at the Argonaute cleavage site. In another embodiment, the meroduplex nick or gap is positioned such that the thermal stability is maximized for the first and second strand duplex and for the first and third strand duplex as compared to the thermal stability of such meroduplexes having a nick or gap in a different position.

[0091] As provided herein, any of the aspects or embodiments disclosed herein would be useful in treating ApoB-associated diseases or disorders, such as atherosclerosis, diabetes mellitus, and cerebrovascular disease.

[0092] In some embodiments, the dsRNA comprises at least three strands in which the first strand comprises about 5 nucleotides to about 40 nucleotides, and the second and third strands include each, individually, about 5 nucleotides to about 20 nucleotides, wherein the combined length of the second and third strands is about 15 nucleotides to about 40 nucleotides. In other embodiments, the dsRNA comprises at least two strands in which the first strand comprises about 15 nucleotides to about 24 nucleotides or about 25 nucleotides to about 40 nucleotides. In yet other embodiments, the first strand comprises about 15 to about 24 nucleotides or about 25 nucleotides to about 40 nucleotides and is complementary to at least about 15, 19, 20, 21, 22, 23, 24, 25, 26, 27, 28, 29, 30, 35, or 40 contiguous nucleotides of a human ApoB mRNA as set forth in SEQ ID NO:1158. In alternative embodiments, the first strand comprises about 15 to about 24 nucleotides or about 25 nucleotides to about 40 nucleotides and is at least about 70%, 75%, 80%, 85%, 90%, 95%, 96%, 97%, 98%, or 99% identical to a sequence that is complementary to at least about 15, 19, 20, 21, 22, 23, 24, 25, 26, 27, 28, 29, 30, 35, or 40 contiguous nucleotides of a human ApoB mRNA as set forth in SEQ ID NO:1158.

[0093] In further embodiments, the first strand will be complementary to a second strand or a second and third strand or to a plurality of strands. The first strand and its complements will be able to form dsRNA and mdRNA molecules of this disclosure, but only about 19 to about 25 nucleotides of the first strand comprise a sequence complementary to an ApoB mRNA. For example, a Dicer substrate dsRNA can have about 25 nucleotides to about 40 nucleotides, but with only 19 nucleotides of the antisense (first) strand being complementary to an ApoB mRNA. In further embodiments, the first strand having complementarity to an ApoB mRNA in about 19 nucleotides to about 25 nucleotides will have one, two, or three mismatches with an ApoB mRNA, such as a sequence set forth in SEQ ID NO:1158, or the first strand of 19 nucleotides to about 25 nucleotides, that for example activates or is capable of loading into RISC, will have at least 80% identity with the corresponding nucleotides found in an ApoB mRNA, such as the sequence set forth in SEQ ID NO:1158.

[0094] Certain illustrative dsRNA molecules, which can be used to design mdRNA molecules and can optionally include substitutions or modifications as described herein are provided in the Sequence Listings as attached herewith, which is herein incorporated by reference (text file “07-R107PCT_Sequence_Listing,” created Feb. 20, 2008 and having a size of 611 kilobytes). In addition, the content of Table B disclosed in U.S. Provisional Patent Application No. 60/934,930 (filed Mar. 16, 2007), which was submitted with that application as a separate text file named “Table_B_Human_RefSeq_Accession_Numbers.txt” (created Mar. 16, 2007 and having a size of 3,604 kilobytes), is incorporated herein by reference in its entirety.

Substituting and Modifying ApoB dsRNA Molecules

[0095] The introduction of substituted and modified nucleotides into mdRNA and dsRNA molecules of this disclosure provides a powerful tool in overcoming potential limitations of in vivo stability and bioavailability inherent to native RNA molecules (i.e., having standard nucleotides) that are exogenously delivered. For example, the use of dsRNA molecules of this disclosure can enable a lower dose of a particular nucleic acid molecule for a given therapeutic effect (e.g., reducing or silencing ApoB expression) since dsRNA molecules of this disclosure tend to have a longer half-life in serum. Furthermore, certain substitutions and modifications can improve the bioavailability of dsRNA by targeting particular cells or tissues or improving cellular uptake of the dsRNA molecules. Therefore, even if the activity of a dsRNA molecule of this disclosure is reduced as compared to a native RNA molecule, the overall activity of the substituted or modified dsRNA molecule can be greater than that of the native RNA molecule due to improved stability or delivery of the molecule. Unlike native unmodified dsRNA, substituted and modified dsRNA can also minimize the possibility of activating the interferon response in, for example, humans.

[0096] In certain embodiments, a dsRNA molecule of this disclosure has at least one uridine, at least three uridines, or each and every uridine (i.e., all uridines) of the first (antisense) strand of the dsRNA substituted or replaced with 5-methyluridine or 2-thioribothymidine. In a related embodiment, the dsRNA molecule or analog thereof of this disclosure has at least one uridine, at least three uridines, or each and every uridine of the second (sense) strand of the dsRNA substituted or replaced with 5-methyluridine or 2-thioribothymidine. In a related embodiment, the dsRNA molecule or analog thereof of this disclosure has at least one uridine, at least three uridines, or each and every uridine of the third (sense) strand of the dsRNA substituted or replaced with 5-methyluridine or 2-thioribothymidine. In still another embodiment, the dsRNA molecule or analog thereof of this disclosure has at least one uridine, at least three uridines, or each and every uridine of both the first (antisense) and second (sense) strands; of both the first (antisense) and third (sense) strands; of both the second (sense) and third (sense) strands; or of all of the first (antisense), second (sense) and third (sense) strands of the dsRNA substituted or replaced with 5-methyluridine or 2-thioribothymidine. In some embodiments, the double-stranded region of a dsRNA molecule has at least three 5-methyluridines or 2-thioribothymidines. In certain embodiments, dsRNA molecules comprise ribonucleotides at about 5% to about 95% of the nucleotide positions in one strand, both strands, or any combination thereof.

[0097] In further embodiments, a dsRNA molecule that decreases expression of an ApoB gene by RNAi according to the instant disclosure further comprises one or more natural or synthetic non-standard nucleoside. In related embodiments, the non-standard nucleoside is one or more deoxyuridine, locked nucleic acid (LNA) molecule, a modified base (e.g., 5-methyluridine), a universal-binding nucleotide, a 2′-O-methyl nucleotide, a modified internucleoside linkage (e.g., phosphorothioate), a G clamp, or any combination thereof. In certain embodiments, the universal-binding nucleotide can be C-phenyl, C-naphthyl, inosine, azole carboxamide, 1-β-D-ribofuranosyl-4-nitroindole, 1-β-D-ribofuranosyl-5-nitroindole, 1-β-D-ribofuranosyl-6-nitroindole, or 1-β-D-ribofuranosyl-3-nitropyrrole.

[0098] Substituted or modified nucleotides present in dsRNA molecules, preferably in the sense or antisense strand, but also optionally in both the antisense and sense strands, comprise modified or substituted nucleotides according to this disclosure having properties or characteristics similar to natural or standard ribonucleotides. For example, this disclosure features dsRNA molecules including nucleotides having a Northern conformation (e.g., Northern pseudorotation cycle; see, e.g., Saenger, Principles of Nucleic Acid Structure, Springer-Verlag ed., 1984). As such, chemically modified nucleotides present in dsRNA molecules of this disclosure, preferably in the antisense strand, but also optionally in the sense or both the antisense and sense strands, are resistant to nuclease degradation while at the same time maintaining the capacity to mediate RNAi. Exemplary nucleotides having a Northern configuration include locked nucleic acid (LNA) nucleotides (e.g., 2′-O, 4′-C-methylene-(D-ribofuranosyl) nucleotides), 2′-methoxyethyl (MOE) nucleotides, 2′-methyl-thio-ethyl, 2′-deoxy-2′-fluoro nucleotides, 2′-deoxy-2′-chloro nucleotides, 2′-azido nucleotides, 5-methyluridines, or 2′-O-methyl nucleotides. In certain embodiments, the LNA is a 5-methyluridine LNA or 2-thio-5-methyluridine LNA. In any of these embodiments, one or more substituted or modified nucleotides can be a G clamp (e.g., a cytosine analog that forms an additional hydrogen bond to guanine, such as 9-(aminoethoxy)phenoxazine; see, e.g., Lin and Mateucci, J. Am. Chem. Soc. 120:8531, 1998).

[0099] As described herein, the first and one or more second strands of a dsRNA molecule or analog thereof provided by this disclosure can anneal or hybridize together (i.e., due to complementarity between the strands) to form at least one double-stranded region having a length of about 4 to about 10 base pairs, about 5 to about 13 base pairs, or about 15 to about 40 base pairs. In some embodiments, the dsRNA has at least one double-stranded region ranging in length from about 15 to about 24 base pairs or about 19 to about 23 base pairs. In other embodiments, the dsRNA has at least one double-stranded region ranging in length from about 26 to about 40 base pairs or about 27 to about 30 base pairs or about 30 to about 35 base pairs. In other embodiments, the two or more strands of a dsRNA molecule of this disclosure may optionally be covalently linked together by nucleotide or non-nucleotide linker molecules.

[0100] In certain embodiments, the dsRNA molecule or analog thereof comprises an overhang of one to four nucleotides on one or both 3′-ends of the dsRNA, such as an overhang comprising a deoxyribonucleotide or two deoxyribonucleotides (e.g., thymidine, adenine). In certain embodiments, the 3′-end comprising one or more deoxyribonucleotide is in an mdRNA molecule and is either in the gap, not in the gap, or any combination thereof. In some embodiments, dsRNA molecules or analogs thereof have a blunt end at one or both ends of the dsRNA. In certain embodiments, the 5′-end of the first or second strand is phosphorylated. In any of the embodiments of dsRNA molecules described herein, the 3′-terminal nucleotide overhangs can comprise ribonucleotides or deoxyribonucleotides that are chemically-modified at a nucleic acid sugar, base, or backbone. In any of the embodiments of dsRNA molecules described herein, the 3′-terminal nucleotide overhangs can comprise one or more universal base ribonucleotides. In any of the embodiments of dsRNA molecules described herein, the 3′-terminal nucleotide overhangs can comprise one or more acyclic nucleotides. In any of the embodiments of dsRNA molecules described herein, the dsRNA can further comprise a terminal phosphate group, such as a 5′-phosphate (see Martinez et al., Cell 110:563-574, 2002; and Schwarz et al., Molec. Cell 10:537-568, 2002) or a 5′,3′-diphosphate.

[0101] As set forth herein, the terminal structure of dsRNAs of this disclosure that decrease expression of an ApoB gene by, for example, RNAi may either have blunt ends or one or more overhangs. In certain embodiments, the overhang may be at the 3′-end or the 5′-end. The total length of dsRNAs having overhangs is expressed as the sum of the length of the paired double-stranded portion together with the overhanging nucleotides. For example, if a 19 base pair dsRNA has a two nucleotide overhang at both ends, the total length is expressed as 21-mer. Furthermore, since the overhanging sequence may have low specificity to an ApoB gene, it is not necessarily complementary (antisense) or identical (sense) to an ApoB gene sequence. In further embodiments, a dsRNA of this disclosure that decreases expression of an ApoB gene by RNAi may further comprise a low molecular weight structure (e.g., a natural RNA molecule such as a tRNA, rRNA or viral RNA, or an artificial RNA molecule) at, for example, one or more overhanging portion of the dsRNA.

[0102] In further embodiments, a dsRNA molecule that decreases expression of an ApoB gene by RNAi according to the instant disclosure further comprises a 2′-sugar substitution, such as 2′-deoxy, 2′-O-methyl, 2′-O-methoxyethyl, 2′-O-2-methoxyethyl, halogen, 2′-fluoro, 2′-O-allyl, or the like, or any combination thereof. In still further embodiments, a dsRNA molecule that decreases expression of an ApoB gene by RNAi according to the instant disclosure further comprises a terminal cap substituent on one or both ends of the first strand or one or more second strands, such as an alkyl, abasic, deoxy abasic, glyceryl, dinucleotide, acyclic nucleotide, inverted deoxynucleotide moiety, or any combination thereof. In certain embodiments, at least one or two 5′-terminal ribonucleotides of the sense strand within the double-stranded region have a 2′-sugar substitution. In certain other embodiments, at least one or two 5′-terminal ribonucleotides of the antisense strand within the double-stranded region have a 2′-sugar substitution. In certain embodiments, at least one or two 5′-terminal ribonucleotides of the sense strand and the antisense strand within the double-stranded region have a 2′-sugar substitution.

[0103] In other embodiments, a dsRNA molecule that decreases expression of one or more target gene by RNAi according to the instant disclosure comprises one or more substitutions in the sugar backbone, including any combination of ribosyl, 2′-deoxyribosyl, a tetrofuranosyl (e.g., L-α-threofuranosyl), a hexopyranosyl (e.g., β-allopyranosyl, β-altropyranosyl, and β-glucopyranosyl), a pentopyranosyl (e.g., β-ribopyranosyl, α-lyxopyranosyl, β-xylopyranosyl, and α-arabinopyranosyl), a carbocyclic (carbon only ring) analog, a pyranose, a furanose, a morpholino, or analogs or derivatives thereof.

[0104] In yet other embodiments, a dsRNA molecule that decreases expression of an ApoB gene (including a mRNA splice variant thereof) by RNAi according to the instant disclosure further comprises at least one modified internucleoside linkage, such as independently a phosphorothioate, chiral phosphorothioate, phosphorodithioate, phosphotriester, aminoalkylphosphotriester, methyl phosphonate, alkyl phosphonate, 3′-alkylene phosphonate, 5′-alkylene phosphonate, chiral phosphonate, phosphonoacetate, thiophosphonoacetate, phosphinate, phosphoramidate, 3′-amino phosphoramidate, aminoalkylphosphoramidate, thionophosphoramidate, thionoalkylphosphonate, thionoalkylphosphotriester, selenophosphate, boranophosphate linkage, or any combination thereof.

[0105] A modified internucleotide linkage, as described herein, can be present in one or more strands of a dsRNA molecule of this disclosure, for example, in the sense strand, the antisense strand, both strands, or a plurality of strands (e.g., in an mdRNA). The dsRNA molecules of this disclosure can comprise one or more modified internucleotide linkages at the 3′-end, the 5′-end, or both of the 3′- and 5′-ends of the second sense strand, the third sense strand, the antisense strand or any combination of the antisense strand and one or more of the sense strands. In one embodiment, a dsRNA molecule capable of decreasing expression of an ApoB gene (including a specific or selected mRNA splice variant thereof) by RNAi has one modified internucleotide linkage at the 3′-end, such as a phosphorothioate linkage. For example, this disclosure provides a dsRNA molecule capable of decreasing expression of an ApoB gene by RNAi having about 1 to about 8 or more phosphorothioate internucleotide linkages in one dsRNA strand. In yet another embodiment, this disclosure provides a dsRNA molecule capable of decreasing expression of an ApoB gene by RNAi having about 1 to about 8 or more phosphorothioate internucleotide linkages in the dsRNA strands. In other embodiments, an exemplary dsRNA molecule of this disclosure can comprise from about 1 to about 5 or more consecutive phosphorothioate internucleotide linkages at the 5′-end of the sense strand, the antisense strand, both strands, or a plurality of strands. In another example, an exemplary dsRNA molecule of this disclosure can comprise one or more pyrimidine phosphorothioate internucleotide linkages in the sense strand, the antisense strand, either strand, or a plurality of strands. In yet another example, an exemplary dsRNA molecule of this disclosure comprises one or more purine phosphorothioate internucleotide linkages in the sense strand, the antisense strand, either strand, or a plurality of strands.

[0106] Many exemplary modified nucleotide bases or analogs thereof useful in the dsRNA of the instant disclosure include 5-methylcytosine; 5-hydroxymethylcytosine; xanthine; hypoxanthine; 2-aminoadenine; 6-methyl, 2-propyl, or other alkyl derivatives of adenine and guanine; 8-substituted adenines and guanines (such as 8-aza, 8-halo, 8-amino, 8-thiol, 8-thioalkyl, 8-hydroxyl, or the like); 7-methyl, 7-deaza, and 3-deaza adenines and guanines; 2-thiouracil; 2-thiothymine; 2-thiocytosine; 5-methyl, 5-propynyl, 5-halo (such as 5-bromo or 5-fluoro), 5-trifluoromethyl, or other 5-substituted uracils and cytosines; and 6-azouracil. Further useful nucleotide bases can be found in Kurreck, Eur. J. Biochem. 270:1628, 2003; Herdewijn, Antisense Nucleic Acid Develop. 10:297, 2000; Concise Encyclopedia of Polymer Science and Engineering, pages 858-859, Kroschwitz, J. I., ed. John Wiley & Sons, 1990; U.S. Pat. No. 3,687,808, and similar references.

[0107] Certain nucleotide base moieties are particularly useful for increasing the binding affinity of the dsRNA molecules of this disclosure to complementary targets. These include 5-substituted pyrimidines; 6-azapyrimidines; and N-2, N-6, or O-6 substituted purines (including 2-aminopropyladenine, 5-propynyluracil and 5-propynylcytosine). For example, 5-methyluridine and 5-methylcytosine substitutions are known to increase nucleic acid duplex stability, which can be combined with 2′-sugar modifications (such as 2′-methoxy or 2′-methoxyethyl) or internucleoside linkages (e.g., phosphorothioate) that provide nuclease resistance to the modified or substituted dsRNA.

[0108] In another aspect of the instant disclosure, there is provided a dsRNA that decreases expression of an ApoB gene, comprising a first strand that is complementary to an ApoB mRNA set forth in SEQ ID NO:1158 and a second strand that is complementary to the first strand, wherein the first and second strands form a double-stranded region of about 15 to about 40 base pairs; wherein at least one pyrimidine of the dsRNA is substituted with a pyrimidine nucleoside according to Formula I or II:

[chemical structure]

wherein R¹ and R² are each independently a —H, —OH, —OCH₃, —OCH₂OCH₂CH₃, —OCH₂CH₂OCH₃, halogen, substituted or unsubstituted C₁-C₁₀ alkyl, alkoxy, alkoxyalkyl, hydroxyalkyl, carboxyalkyl, alkylsulfonylamino, aminoalkyl, dialkylamino, alkylaminoalkyl, dialkylaminoalkyl, haloalkyl, trifluoromethyl, cycloalkyl, (cycloalkyl)alkyl, substituted or unsubstituted C₂-C₁₀ alkenyl, substituted or unsubstituted —O-allyl, —O—CH₂CH═CH₂, —O—CH═CHCH₃, substituted or unsubstituted C₂-C₁₀ alkynyl, carbamoyl, carbamyl, carboxy, carbonylamino, substituted or unsubstituted aryl, substituted or unsubstituted aralkyl, —NH₂, —NO₂, —C≡N, or heterocyclo group; R³ and R⁴ are each independently a hydroxyl, a protected hydroxyl, or an internucleoside linking group; and R⁵ and R⁸ are each independently O or S. In certain embodiments, at least one nucleoside is according to Formula I in which R¹ is methyl and R² is —OH, or R¹ is methyl, R² is —OH, and R⁸ is S. In other embodiments, the internucleoside linking group covalently links from about 5 to about 40 nucleosides.

[0109] In certain embodiments, the first and one or more second strands of a dsRNA, which decreases expression of an ApoB gene by RNAi and has at least one pyrimidine substituted with a pyrimidine nucleoside according to Formula I or II, can anneal or hybridize together (i.e., due to complementarity between the strands) to form at least one double-stranded region having a length or a combined length of about 15 to about 40 base pairs. In some embodiments, the dsRNA has at least one double-stranded region ranging in length from about 4 base pairs to about 10 base pairs or about 5 to about 13 base pairs or about 15 to about 25 base pairs or about 19 to about 23 base pairs. In other embodiments, the dsRNA has at least one double-stranded region ranging in length from about 26 to about 40 base pairs or about 27 to about 30 base pairs or about 30 to about 35 base pairs. In certain embodiments, the dsRNA molecule or analog thereof has an overhang of one to four nucleotides on one or both 3′-ends, such as an overhang comprising a deoxyribonucleotide or two deoxyribonucleotides (e.g., thymidine). In some embodiments, dsRNA molecule or analog thereof has a blunt end at one or both ends of the dsRNA. In certain embodiments, the 5′-end of the first or second strand is phosphorylated.

[0110] In certain embodiments, at least one R¹ is a C₁-C₅ alkyl, such as methyl or ethyl. Within other exemplary embodiments of this disclosure, compounds of Formula I are a 5-alkyluridine (i.e., R¹ is alkyl, R² is —OH, and R³, R⁴, and R⁵ are as defined herein) or compounds of Formula II are a 5-alkylcytidine (i.e., R¹ is alkyl, R² is —OH, and R³, R⁴, and R⁵ are as defined herein). In related embodiments, the 5-alkyluridine is a 5-methyluridine (also referred to as ribothymidine or T^{r}—i.e., R¹ is methyl and R² is —OH), and the 5-alkylcytidine is a 5-methylcytidine. In other embodiments, at least one, at least three, or all uridines of the first strand of the dsRNA are replaced with 5-methyluridine, or at least one, at least three, or all uridines of the second strand of the dsRNA are replaced with 5-methyluridine, or any combination thereof (e.g., such changes are made on more than one strand). In certain embodiments, at least one pyrimidine nucleoside of Formula I or Formula II has an R⁵ that is S or R⁸ that is S.

[0111] In further embodiments, at least one pyrimidine nucleoside of the dsRNA is a locked nucleic acid (LNA) in the form of a bicyclic sugar, wherein R² is oxygen, and the 2′-O and 4′-C form an oxymethylene bridge on the same ribose ring. In a related embodiment, the LNA comprises a base substitution, such as a 5-methyluridine LNA or 2-thio-5-methyluridine LNA. In other embodiments, at least one, at least three, or all uridines of the first strand of the dsRNA are replaced with 5-methyluridine or 2-thioribothymidine or 5-methyluridine LNA or 2-thio-5-methyluridine LNA, or at least one, at least three, or all uridines of the second strand of the dsRNA are replaced with 5-methyluridine, 2-thioribothymidine, 5-methyluridine LNA, 2-thio-5-methyluridine LNA, or any combination thereof (e.g., such changes are made on both strands, or some substitutions include 5-methyluridine only, 2-thioribothymidine only, 5-methyluridine LNA only, 2-thio-5-methyluridine LNA only, or one or more 5-methyluridine or 2-thioribothymidine with one or more 5-methyluridine LNA or 2-thio-5-methyluridine LNA).

[0112] In further embodiments, a ribose of the pyrimidine nucleoside or the internucleoside linkage can be optionally modified. For example, compounds of Formula I or II are provided wherein R² is alkoxy, such as a 2′-O-methyl substitution (e.g., which may be in addition to a 5-alkyluridine or a 5-alkylcytidine, respectively). In certain embodiments, R² is selected from 2′-O—(C₁-C₅) alkyl, 2′-O-methyl, 2′-OCH₂OCH₂CH₃, 2′-OCH₂CH₂OCH₃, 2′-O-allyl, or 2′-fluoro. In further embodiments, one or more of the pyrimidine nucleosides are according to Formula I in which R¹ is methyl and R² is a 2′-O—(C₁-C₅) alkyl (e.g., 2′-O-methyl), or in which R¹ is methyl, R² is a 2′O—(C₁-C₅) alkyl (e.g., 2′O-methyl), and R² is S, or any combination thereof. In other embodiments, one or more, or at least two, pyrimidine nucleosides according to Formula I or II have an R² that is not —H or —OH and is incorporated at a 3′-end or 5′-end and not within the gap of one or more strands within the double-stranded region of the dsRNA molecule.

[0113] In further embodiments, a dsRNA molecule or analog thereof comprising a pyrimidine nucleoside according to Formula I or Formula II in which R² is not —H or —OH and an overhang, further comprises at least two of pyrimidine nucleosides that are incorporated either at a 3′-end or a 5′-end or both of one strand or two strands within the double-stranded region of the dsRNA molecule. In a related embodiment, at least one of the at least two pyrimidine nucleosides in which R² is not —H or —OH is located at a 3′-end or a 5′-end within the double-stranded region of at least one strand of the dsRNA molecule, and wherein at least one of the at least two pyrimidine nucleosides in which R² is not —H or —OH is located internally within a strand of the dsRNA molecule. In still further embodiments, a dsRNA molecule or analog thereof that has an overhang has a first of the two or more pyrimidine nucleosides in which R² is not —H or —OH that is incorporated at a 5′-end within the double-stranded region of the sense strand of the dsRNA molecule and a second of the two or more pyrimidine nucleosides is incorporated at a 5′-end within the double-stranded region of the antisense strand of the dsRNA molecule. In any of these embodiments, one or more substituted or modified nucleotides can be a G clamp (e.g., a cytosine analog that forms an additional hydrogen bond to guanine, such as 9-(aminoethoxy)phenoxazine; see, e.g., Lin and Mateucci, 1998). In any of these embodiments, provided the one or more pyrimidine nucleosides are not within the gap.

[0114] In yet other embodiments, a dsRNA molecule or analog thereof of Formula I or II according to the instant disclosure that has an overhang that comprises four or more independent pyrimidine nucleosides or four or more independent pyrimidine nucleosides in which R² is not —H or —OH, wherein (a) a first pyrimidine nucleoside is incorporated into a 3′-end within the double-stranded region of the sense (second) strand of the dsRNA, (b) a second pyrimidine nucleoside is incorporated into a 5′-end within the double-stranded region of the sense (second) strand, (c) a third pyrimidine nucleoside is incorporated into a 3′-end within the double-stranded region of the antisense (first) strand of the dsRNA, and (d) a fourth pyrimidine nucleoside is incorporated into a 5′-end within the double-stranded region of the antisense (first) strand. In any of these embodiments, provided the one or more pyrimidine nucleosides are not within the gap.

[0115] In further embodiments, a dsRNA molecule or analog thereof comprising a pyrimidine nucleoside according to Formula I or Formula II in which R² is not —H or —OH and is blunt-ended, further comprises at least two of pyrimidine nucleosides that are incorporated either at a 3′-end or a 5′-end or both of one strand or two strands of the dsRNA molecule. In a related embodiment, at least one of the at least two pyrimidine nucleosides in which R² is not —H or —OH is located at a 3′-end or a 5′-end of at least one strand of the dsRNA molecule, and wherein at least one of the at least two pyrimidine nucleosides in which R² is not —H or —OH is located internally within a strand of the dsRNA molecule. In still further embodiments, a dsRNA molecule or analog thereof that is blunt-ended has a first of the two or more pyrimidine nucleosides in which R² is not —H or —OH that is incorporated at a 5′-end of the sense strand of the dsRNA molecule and a second of the two or more pyrimidine nucleosides is incorporated at a 5′-end of the antisense strand of the dsRNA molecule. In any of these embodiments, provided the one or more pyrimidine nucleosides are not within the gap.

[0116] In yet other embodiments, a dsRNA molecule comprising a pyrimidine nucleoside according to Formula I or Formula II and that is blunt-ended comprises four or more independent pyrimidine nucleosides or four or more independent pyrimidine nucleosides in which R² is not —H or —OH, wherein (a) a first pyrimidine nucleoside is incorporated into a 3′-end within the double-stranded region of the sense (second) strand of the dsRNA, (b) a second pyrimidine nucleoside is incorporated into a 5′-end within the double-stranded region of the sense (second) strand, (c) a third pyrimidine nucleoside is incorporated into a 3′-end within the double-stranded region of the antisense (first) strand of the dsRNA, and (d) a fourth pyrimidine nucleoside is incorporated into a 5′-end within the double-stranded region of the antisense (first) strand. In any of these embodiments, provided the one or more pyrimidine nucleosides are not within the gap.

[0117] In still further embodiments, a dsRNA molecule or analog thereof of Formula I or II according to the instant disclosure further comprises a terminal cap substituent on one or both ends of the first strand or second strand, such as an alkyl, abasic, deoxy abasic, glyceryl, dinucleotide, acyclic nucleotide, inverted deoxynucleotide moiety, or any combination thereof. In further embodiments, one or more internucleoside linkage can be optionally modified. For example, a dsRNA molecule or analog thereof of Formula I or II according to the instant disclosure wherein at least one internucleoside linkage is modified to a phosphorothioate, chiral phosphorothioate, phosphorodithioate, phosphotriester, aminoalkylphosphotriester, methyl phosphonate, alkyl phosphonate, 3′-alkylene phosphonate, 5′-alkylene phosphonate, chiral phosphonate, phosphonoacetate, thiophosphonoacetate, phosphinate, phosphoramidate, 3′-amino phosphoramidate, aminoalkylphosphoramidate, thionophosphoramidate, thionoalkylphosphonate, thionoalkylphosphotriester, selenophosphate, boranophosphate linkage, or any combination thereof.

[0118] In still another embodiment, a nicked or gapped dsRNA molecule (ndsRNA or gdsRNA, respectively) that decreases expression of an ApoB gene by RNAi, comprising a first strand that is complementary to an ApoB mRNA set forth in SEQ ID NO:1158 and two or more second strands that are complementary to the first strand, wherein the first and at least one of the second strands form a non-overlapping double-stranded region of about 5 to about 13 base pairs. Any of the substitutions or modifications described herein is contemplated within this embodiment as well.

[0119] In another exemplary of this disclosure, the dsRNAs comprise at least two or more substituted pyrimidine nucleosides can each be independently selected wherein R¹ comprises any chemical modification or substitution as contemplated herein, for example an alkyl (e.g., methyl), halogen, hydroxy, alkoxy, nitro, amino, trifluoromethyl, cycloalkyl, (cycloalkyl)alkyl, alkanoyl, alkanoyloxy, aryl, aroyl, aralkyl, nitrile, dialkylamino, alkenyl, alkynyl, hydroxyalkyl, aminoalkyl, alkylaminoalkyl, dialkylaminoalkyl, haloalkyl, carboxyalkyl, alkoxyalkyl, carboxy, carbonyl, alkanoylamino, carbamoyl, carbonylamino, alkylsulfonylamino, or heterocyclo group. When two or more modified ribonucleotides are present, each modified ribonucleotide can be independently modified to have the same, or different, modification or substitution at R¹ or R².

[0120] In other detailed embodiments, one or more substituted pyrimidine nucleosides according to Formula I or II can be located at any ribonucleotide position, or any combination of ribonucleotide positions, on either or both of the sense and antisense strands of a dsRNA molecule of this disclosure, including at one or more multiple terminal positions as noted above, or at any one or combination of multiple non-terminal (“internal”) positions. In this regard, each of the sense and antisense strands can incorporate about 1 to about 6 or more of the substituted pyrimidine nucleosides.

[0121] In certain embodiments, when two or more substituted pyrimidine nucleosides are incorporated within a dsRNA of this disclosure, at least one of the substituted pyrimidine nucleosides will be at a 3′- or 5′-end of one or both strands, and in certain embodiments at least one of the substituted pyrimidine nucleosides will be at a 5′-end of one or both strands. In other embodiments, the substituted pyrimidine nucleosides are located at a position corresponding to a position of a pyrimidine in an unmodified dsRNA that is constructed as a homologous sequence for targeting a cognate mRNA, as described herein.

[0122] In addition, the terminal structure of the dsRNAs of this disclosure may have a stem-loop structure in which ends of one side of the dsRNA molecule are connected by a linker nucleic acid, e.g., a linker RNA. The length of the double-stranded region (stem-loop portion) can be, for example, about 15 to about 49 bp, about 15 to about 35 bp, or about 21 to about 30 bp long. Alternatively, the length of the double-stranded region that is a final transcription product of dsRNAs to be expressed in a target cell may be, for example, approximately about 15 to about 49 bp, about 15 to about 35 bp, or about 21 to about 30 bp long. When linker segments are employed, there is no particular limitation in the length of the linker as long as it does not hinder pairing of the stem portion. For example, for stable pairing of the stem portion and suppression of recombination between DNAs coding for this portion, the linker portion may have a clover-leaf tRNA structure. Even if the linker has a length that would hinder pairing of the stem portion, it is possible, for example, to construct the linker portion to include introns so that the introns are excised during processing of a precursor RNA into mature RNA, thereby allowing pairing of the stem portion. In the case of a stem-loop dsRNA, either end (head or tail) of RNA with no loop structure may have a low molecular weight RNA. As described above, these low molecular weight RNAs may include a natural RNA molecule, such as tRNA, rRNA or viral RNA, or an artificial RNA molecule.

[0123] A dsRNA molecule may be comprised of a circular nucleic acid molecule, wherein the dsRNA is about 38 to about 70 nucleotides in length having from about 18 to about 23 base pairs (e.g., about 19 to about 21 bp) wherein the circular oligonucleotide forms a dumbbell shaped structure having about 19 base pairs and two loops. In certain embodiments, a circular dsRNA molecule contains two loop motifs wherein one or both loop portions of the dsRNA molecule is biodegradable. For example, a circular dsRNA molecule of this disclosure is designed such that degradation of the loop portions of the dsRNA molecule in vivo can generate a dsRNA molecule with 3′-terminal overhangs, such as 3′-terminal nucleotide overhangs comprising from about 1 to about 4 (unpaired) nucleotides.

[0124] Substituting or modifying nucleosides of a dsRNA according to this disclosure can result in increased resistance to enzymatic degradation, such as exonucleolytic degradation, including 5′-exonucleolytic or 3′-exonucleolytic degradation. As such, in some embodiments, the dsRNAs described herein will exhibit significant resistance to enzymatic degradation compared to a corresponding dsRNA having standard nucleotides, and will thereby possess greater stability, increased half-life, and greater bioavailability in physiological environments (e.g., when introduced into a eukaryotic target cell). In addition to increasing resistance of the substituted or modified dsRNAs to exonucleolytic degradation, the incorporation of one or more pyrimidine nucleosides according to Formula I or II will render dsRNAs more resistant to other enzymatic or chemical degradation processes and thus more stable and bioavailable than otherwise identical dsRNAs that do not include the substitutions or modifications. In related aspects of this disclosure, dsRNA substitutions or modifications described herein will often improve stability of a modified dsRNA for use within research, diagnostic and treatment methods wherein the modified dsRNA is contacted with a biological sample, for example, a mammalian cell, intracellular compartment, serum or other extracellular fluid, tissue, or other in vitro or in vivo physiological compartment or environment. In one embodiment, diagnosis is performed on an isolated biological sample. In another embodiment, the diagnostic method is performed in vitro. In a further embodiment, the diagnostic method is not performed (directly) on a human or animal body.

[0125] In addition to increasing stability of substituted or modified dsRNAs, incorporation of one or more pyrimidine nucleosides according to Formula I or II in a dsRNA designed for gene silencing can provide additional desired functional results, including increasing a melting point of a substituted or modified dsRNA compared to a corresponding unmodified dsRNA. In another aspect of this disclosure, certain substitutions or modifications of dsRNAs described herein can reduce “off-target effects” of the substituted or modified dsRNA molecules when they are contacted with a biological sample (e.g., when introduced into a target eukaryotic cell having specific, and non-specific mRNA species present as potential specific and non-specific targets). In yet another aspect of this disclosure, the dsRNA substitutions or modifications described herein can reduce interferon activation by the dsRNA molecule when the dsRNA is contacted with a biological sample, e.g., when introduced into a eukaryotic cell.

[0126] In further embodiments, dsRNAs of this disclosure can comprise one or more sense (second) strand that is homologous or corresponds to a sequence of a target gene (e.g., an ApoB) and an antisense (first) strand that is complementary to the sense strand and a sequence of the target gene (e.g., an ApoB). In exemplary embodiments, at least one strand of the dsRNA incorporates one or more pyrimidines substituted according to Formula I or II (e.g., wherein the pyrimidine is one or more 5-methyluridines or 2-thioribothymidines, the ribose is modified to incorporate one or more 2′-O-methyl substitutions, or any combination thereof). These and other multiple substitutions or modifications according to Formula I or II can be introduced into one or more pyrimidines, or into any combination and up to all pyrimidines present in one or more strands of a dsRNA of the instant disclosure, so long as the dsRNA has or retains RNAi activity similar to or better than the activity of an unmodified dsRNA.

[0127] In any of the embodiments described herein, the dsRNA may include multiple modifications. For example, a dsRNA having at least one ribothymidine or 2-thioribothymidine may further comprise at least one LNA, 2′-methoxy, 2′-fluoro, 2′-deoxy, phosphorothioate linkage, an inverted base terminal cap, or any combination thereof. In certain embodiments, a dsRNA will have from one to all uridines substituted with ribothymidine and have up to about 75% LNA substitutions. In other embodiments, a dsRNA will have from one to all uridines substituted with ribothymidine and have up to about 75% 2′-methoxy substitutions (and not at the Argonaute cleavage site). In still other embodiments, a dsRNA will have from one to all uridines substituted with ribothymidine and have up to about 100% 2′-fluoro substitutions. In further embodiments, a dsRNA will have from one to all uridines substituted with ribothymidine and have up to about 75% 2′-deoxy substitutions. In further embodiments, a dsRNA will have up to about 75% LNA substitutions and have up to about 75% 2′-methoxy substitutions. In still other embodiments, a dsRNA will have up to about 75% LNA substitutions and have up to about 100% 2′-fluoro substitutions. In further embodiments, a dsRNA will have up to about 75% LNA substitutions and have up to about 75% 2′-deoxy substitutions. In further embodiments, a dsRNA will have up to about 75% 2′-methoxy substitutions and have up to about 100% 2′-fluoro substitutions. In further embodiments, a dsRNA will have up to about 75% 2′-methoxy substitutions and have up to about 75% 2′-deoxy substitutions. In further embodiments, a dsRNA will have up to about 100% 2′-fluoro substitutions and have up to about 75% 2′-deoxy substitutions.

[0128] In further multiple modification embodiments, a dsRNA will have from one to all uridines substituted with ribothymidine, up to about 75% LNA substitutions, and up to about 75% 2′-methoxy substitutions. In still further embodiments, a dsRNA will have from one to all uridines substituted with ribothymidine, up to about 75% LNA substitutions, and up to about 100% 2′-fluoro substitutions. In further embodiments, a dsRNA will have from one to all uridines substituted with ribothymidine, up to about 75% LNA substitutions, and up to about 75% 2′-deoxy substitutions. In further embodiments, a dsRNA will have from one to all uridines substituted with ribothymidine, up to about 75% 2′-methoxy substitutions, and up to about 75% 2′-fluoro substitutions. In further embodiments, a dsRNA will have from one to all uridines substituted with ribothymidine, up to about 75% 2′-methoxy substitutions, and up to about 75% 2′-deoxy substitutions. In further embodiments, a dsRNA will have from one to all uridines substituted with ribothymidine, up to about 100% 2′-fluoro substitutions, and up to about 75% 2′-deoxy substitutions. In yet further embodiments, a dsRNA will have from one to all uridines substituted with ribothymidine, up to about 75% LNA substitutions, up to about 75% 2′-methoxy, up to about 100% 2′-fluoro, and up to about 75% 2′-deoxy substitutions. In other embodiments, a dsRNA will have up to about 75% LNA substitutions, up to about 75% 2′-methoxy substitutions, and up to about 100% 2′-fluoro substitutions. In further embodiments, a dsRNA will have up to about 75% LNA substitutions, up to about 75% 2′-methoxy substitutions, and up to about 75% 2′-deoxy substitutions. In further embodiments, a dsRNA will have up to about 75% LNA substitutions, up to about 100% 2′-fluoro substitutions, and up to about 75% 2′-deoxy substitutions. In still further embodiments, a dsRNA will have up to about 75% 2′-methoxy, up to about 100% 2′-fluoro, and up to about 75% 2′-deoxy substitutions.

[0129] In any of these multiple modification embodiments, the dsRNA may further comprise up to 100% phosphorothioate internucleoside linkages, from one to ten or more inverted base terminal caps, or any combination thereof. Additionally, any of these multiple modification embodiments may have these multiple modifications on one strand, two strands, three strands, a plurality of strands, or all strands. Finally, in any of these multiple modification dsRNA, the dsRNA must have gene silencing activity.

[0130] Within certain aspects, the present disclosure provides dsRNA that decreases expression of an ApoB gene by RNAi (e.g., an ApoB of SEQ ID NO:1158), and compositions comprising one or more dsRNA, wherein at least one dsRNA comprises one or more universal-binding nucleotide(s) in the first, second or third position in the anti-codon of the antisense or sense strand of the dsRNA and wherein the dsRNA is capable of specifically binding to an ApoB sequence, such as an RNA expressed by a target cell. In cases wherein the sequence of a target ApoB RNA includes one or more single nucleotide substitutions, dsRNA comprising a universal-binding nucleotide retains its capacity to specifically bind a target ApoB RNA, thereby mediating gene silencing and, as a consequence, overcoming escape of the target ApoB from dsRNA-mediated gene silencing. Examplary universal-binding nucleotides that may be suitably employed in the compositions and methods disclosed herein include inosine, 1-β-D-ribofuranosyl-5-nitroindole, or 1-β-D-ribofuranosyl-3-nitropyrrole.

[0131] In certain aspects, dsRNA disclosed herein can include between about 1 universal-binding nucleotide and about 10 universal-binding nucleotides. Within other aspects, the presently disclosed dsRNA may comprise a sense strand that is homologous to a sequence of an ApoB gene and an antisense strand that is complementary to the sense strand, with the proviso that at least one nucleotide of the antisense or sense strand of the otherwise complementary dsRNA duplex has one or more universal-binding nucleotide.

### Synthesis of Nucleic Acid Molecules

[0132] Exemplary molecules of the instant disclosure are recombinantly produced, chemically synthesized, or a combination thereof. Oligonucleotides (e.g., certain modified oligonucleotides or portions of oligonucleotides lacking ribonucleotides) are synthesized using protocols known in the art, for example as described in Caruthers et al., Methods in Enzymol. 211:3-19, 1992; Thompson et al., PCT Publication No. WO 99/54459, Wincott et al., Nucleic Acids Res. 23:2677-2684, 1995; Wincott et al., Methods Mol. Bio. 74:59, 1997; Brennan et al., Biotechnol Bioeng. 61:33-45, 1998; and Brennan, U.S. Pat. No. 6,001,311. Synthesis of RNA, including certain dsRNA molecules and analogs thereof of this disclosure, can be made using the procedure as described in Usman et al., J. Am. Chem. Soc. 109:7845, 1987; Scaringe et al., Nucleic Acids Res. 18:5433, 1990; and Wincott et al., Nucleic Acids Res. 23:2677-2684, 1995; Wincott et al., Methods Mol. Bio. 74:59, 1997.

[0133] In certain embodiments, the nucleic acid molecules of the present disclosure can be synthesized separately and joined together post-synthetically, for example, by ligation (Moore et al., Science 256:9923, 1992; Draper et al., PCT Publication No. WO 93/23569; Shabarova et al., Nucleic Acids Res. 19:4247, 1991; Bellon et al., Nucleosides & Nucleotides 16:951, 1997; Bellon et al., Bioconjugate Chem. 8:204, 1997), or by hybridization following synthesis or deprotection.

[0134] In further embodiments, dsRNAs of this disclosure that decrease expression of an ApoB gene by RNAi can be made as single or multiple transcription products expressed by a polynucleotide vector encoding one or more dsRNAs and directing their expression within host cells. In these embodiments the double-stranded portion of a final transcription product of the dsRNAs to be expressed within the target cell can be, for example, about 5 to about 40 bp, about 15 to about 24 bp, or about 25 to about 40 bp long. Within exemplary embodiments, double-stranded portions of dsRNAs, in which two or more strands pair up, are not limited to completely paired nucleotide segments, and may contain non-pairing portions due to a mismatch (the corresponding nucleotides are not complementary), bulge (lacking in the corresponding complementary nucleotide on one strand), overhang, or the like. Non-pairing portions can be contained to the extent that they do not interfere with dsRNA formation and function. In certain embodiments, a “bulge” may comprise 1 to 2 non-pairing nucleotides, and the double-stranded region of dsRNAs in which two strands pair up may contain from about 1 to 7, or about 1 to 5 bulges. In addition, “mismatch” portions contained in the double-stranded region of dsRNAs may include from about 1 to 7, or about 1 to 5 mismatches. In other embodiments, the double-stranded region of dsRNAs of this disclosure may contain both bulge and mismatched portions in the approximate numerical ranges specified herein.

[0135] A dsRNA or analog thereof of this disclosure may be further comprised of a nucleotide, non-nucleotide, or mixed nucleotide/non-nucleotide linker that joins the sense region of the dsRNA to the antisense region of the dsRNA. In one embodiment, a nucleotide linker can be a linker of more than about 2 nucleotides length up to about 10 nucleotides in length. In another embodiment, the nucleotide linker can be a nucleic acid aptamer. By “aptamer” or “nucleic acid aptamer” as used herein is meant a nucleic acid molecule that binds specifically to a target molecule wherein the nucleic acid molecule has sequence that comprises a sequence recognized by the target molecule in its natural setting. Alternately, an aptamer can be a nucleic acid molecule that binds to a target molecule wherein the target molecule does not naturally bind to a nucleic acid. The target molecule can be any molecule of interest. For example, the aptamer can be used to bind to a ligand-binding domain of a protein, thereby preventing interaction of the naturally occurring ligand with the protein. This is a non-limiting example and those in the art will recognize that other embodiments can be readily generated using techniques generally known in the art (see, e.g., Gold et al., Annu. Rev. Biochem. 64:763, 1995; Brody and Gold, J. Biotechnol. 74:5, 2000; Sun, Curr. Opin. Mol. Ther. 2:100, 2000; Kusser, J. Biotechnol. 74:27, 2000; Hermann and Patel, Science 287:820, 2000; and Jayasena, Clinical Chem. 45:1628, 1999).

[0136] A non-nucleotide linker may be comprised of an abasic nucleotide, polyether, polyamine, polyamide, peptide, carbohydrate, lipid, polyhydrocarbon, or other polymeric compounds (e.g., polyethylene glycols such as those having between 2 and 100 ethylene glycol units). Specific examples include those described by Seela and Kaiser, Nucleic Acids Res. 18:6353, 1990, and Nucleic Acids Res. 15:3113, 1987; Cload and Schepartz, J. Am. Chem. Soc. 113:6324, 1991; Richardson and Schepartz, J. Am. Chem. Soc. 113:5109, 1991; P Ma et al., Nucleic Acids Res. 21:2585, 1993, and Biochemistry 32:1751, 1993; Durand et al., Nucleic Acids Res. 18:6353, 1990; McCurdy et al., Nucleosides & Nucleotides 10:287, 1991; Jaschke et al., Tetrahedron Lett. 34:301, 1993; Ono et al., Biochemistry 30:9914, 1991; Arnold et al., PCT Publication No. WO 89/02439; Usman et al., PCT Publication No. WO 95/06731; Dudycz et al., PCT Publication No. WO 95/11910 and Ferentz and Verdine, J. Am. Chem. Soc. 113:4000, 1991. The synthesis of a dsRNA molecule of this disclosure, which can be further modified, comprises: (a) synthesis of a first (antisense) strand and synthesis of a second (sense) strand and a third (sense) strand that are each complementary to non-overlapping regions of the first strand; and (b) annealing the first, second and third strands together under conditions suitable to obtain a dsRNA molecule. In another embodiment, synthesis of the first, second and thirdstrands of a dsRNA molecule is by solid phase oligonucleotide synthesis. In yet another embodiment, synthesis of the first, second, and third strands of a dsRNA molecule is by solid phase tandem oligonucleotide synthesis.

[0137] Chemically synthesizing nucleic acid molecules with substitutions or modifications (base, sugar, phosphate, or any combination thereof) can prevent their degradation by serum ribonucleases, which may lead to increased potency. See, e.g., Eckstein et al., PCT Publication No. WO 92/07065; Perrault et al., Nature 344:565, 1990; Pieken et al., Science 253:314, 1991; Usman and Cedergren, Trends in Biochem. Sci. 17:334, 1992; Usman et al., Nucleic Acids Symp. Ser. 31:163, 1994; Beigelman et al., J. Biol. Chem. 270:25702, 1995; Burgin et al., Biochemistry 35:14090, 1996; Burlina et al, Bioorg. Med. Chem. 5:1999, 1997; Thompson et al., Karpeisky et al., Tetrahedron Lett. 39:1131, 1998; Earnshaw and Gait, Biopolymers (Nucleic Acid Sciences) 48:39-55, 1998; Verma and Eckstein, Annu. Rev. Biochem. 67:99-134, 1998; Herdewijn, Antisense Nucleic Acid Drug Dev. 10:297, 2000; Kurreck, Eur. J. Biochem. 270:1628, 2003; Dorsett and Tuschl, Nature Rev. Drug Discov. 3:318, 2004; Rossi et al., PCT Publication No. WO 91/03162; Usman et al., PCT Publication No. WO 93/15187; Beigelman et al., PCT Publication No. WO 97/26270; Woolf et al., PCT Publication No. WO 98/13526; Sproat, U.S. Pat. No. 5,334,711; Usman et al., U.S. Pat. No. 5,627,053; Beigelman et al., U.S. Pat. No. 5,716,824; Ötvos et al., U.S. Pat. No. 5,767,264; Gold et al., U.S. Pat. No. 6,300,074. Each of the above references discloses various substitutions and chemical modifications to the base, phosphate, or sugar moieties of nucleic acid molecules, which can be used in the dsRNAs described herein. For example, oligonucleotides can be modified at the sugar moiety to enhance stability or prolong biological activity by increasing nuclease resistance. Representative sugar modifications include 2′-amino, 2′-C-allyl, 2′-fluoro, 2′-O-methyl, 2′-O-allyl, or 2′-H. Other modifications to enhance stability or prolong biological activity can be internucleoside linkages, such as phosphorothioate, or base-modifications, such as locked nucleic acids (see, e.g., U.S. Pat. Nos. 6,670,461; 6,794,499; 6,268,490), or 5-methyluridine or 2′-O-methyl-5-methyluridine in place of uridine (see, e.g., U.S. Patent Application Publication No. 2006/0142230). Hence, dsRNA molecules of the instant disclosure can be modified to increase nuclease resistance or duplex stability while substantially retaining or having enhanced RNAi activity as compared to unmodified dsRNA.

[0138] In one embodiment, this disclosure features substituted or modified dsRNA molecules, such as phosphate backbone modifications comprising one or more phosphorothioate, phosphorodithioate, methylphosphonate, phosphotriester, morpholino, amidate carbamate, carboxymethyl, acetamidate, polyamide, sulfonate, sulfonamide, sulfamate, formacetal, thioformacetal, or alkylsilyl substitutions. For a review of oligonucleotide backbone modifications, see Hunziker and Leumann, Nucleic Acid Analogues: Synthesis and Properties, in Modern Synthetic Methods, VCH, 331-417, 1995; and Mesmaeker et al., ACS, 24-39, 1994.

[0139] In another embodiment, a conjugate molecule can be optionally attached to a dsRNA or analog thereof that decreases expression of an ApoB gene by RNAi. For example, such conjugate molecules may be polyethylene glycol, human serum albumin, polyarginine, Gln-Asn polymer, or a ligand for a cellular receptor that can, for example, mediate cellular uptake (e.g., HIV TAT, see Vocero-Akbani et al., Nature Med. 5:23, 1999; see also U.S. Patent Application Publication No. 2004/0132161). Examples of specific conjugate molecules contemplated by the instant disclosure that can be attached to a dsRNA or analog thereof of this disclosure are described in Vargeese et al., U.S. Patent Application Publication No. 2003/0130186, and U.S. Patent Application Publication No. 2004/0110296. In another embodiment, a conjugate molecule is covalently attached to a dsRNA or analog thereof that decreases expression of an ApoB gene by RNAi via a biodegradable linker. In certain embodiments, a conjugate molecule can be attached at the 3′-end of either the sense strand, the antisense strand, or both strands of a dsRNA molecule provided herein. In another embodiment, a conjugate molecule can be attached at the 5′-end of either the sense strand, the antisense strand, or both strands of the dsRNA or analog thereof. In yet another embodiment, a conjugate molecule is attached at both the 3′-end and 5′-end of either the sense strand, the antisense strand, or both strands of a dsRNA molecule, or any combination thereof. In further embodiments, a conjugate molecule of this disclosure comprises a molecule that facilitates delivery of a dsRNA or analog thereof into a biological system, such as a cell. A person of skill in the art can screen dsRNA of this disclosure having various conjugates to determine whether the dsRNA-conjugate possesses improved properties (e.g., pharmacokinetic profiles, bioavailability, stability) while maintaining the ability to mediate RNAi in, for example, an animal model as described herein or generally known in the art.

Methods for Selecting dsRNA Molecules Specific for ApoB

[0140] As indicated herein, the present disclosure also provides methods for selecting dsRNA and analogs thereof that are capable of specifically binding to an ApoB gene (including a mRNA splice variant thereof) while being incapable of specifically binding or minimally binding to non-ApoB genes. The selection process disclosed herein is useful, for example, in eliminating dsRNAs analogs that are cytotoxic due to non-specific binding to, and subsequent degradation of, one or more non-ApoB genes.

[0141] Methods of the present disclosure do not require a priori knowledge of the nucleotide sequence of every possible gene variant (including mRNA splice variants) targeted by the dsRNA or analog thereof. In one embodiment, the nucleotide sequence of the dsRNA is selected from a conserved region or consensus sequence of an ApoB gene. In another embodiment, the nucleotide sequence of the dsRNA may be selectively or preferentially targeted to a certain sequence contained in an mRNA splice variant of an ApoB gene.

[0142] In certain embodiments, methods are provided for selecting one or more dsRNA molecule that decreases expression of an ApoB gene by RNAi, comprising a first strand that is complementary to an ApoB mRNA set forth in SEQ ID NO:1158 and a second strand that is complementary to the first strand, wherein the first and second strands form a double-stranded region of about 15 to about 40 base pairs (see, e.g., ApoB sequences in the Sequence Listing identified herein), and wherein at least one uridine of the dsRNA molecule is replaced with a 5-methyluridine or 2-thioribothymidine or 2′-O-methyl-5-methyluridine, which methods employ “off-target” profiling whereby one or more dsRNA provided herein is contacted with a cell, either in vivo or in vitro, and total mRNA is collected for use in probing a microarray comprising oligonucleotides having one or more nucleotide sequence from a panel of known genes, including non-ApoB genes (e.g., interferon). Within related embodiments, one or more dsRNA molecule that decreases expression of an ApoB gene by RNAi may further comprise a third strand that is complementary to the first strand, wherein the first and third strands form a double-stranded region wherein the double-stranded region formed by the first and third strands is non-overlapping with a double-stranded region formed by the first and second strands. The “off-target” profile of the dsRNA provided herein is quantified by determining the number of non-ApoB genes having reduced expression levels in the presence of the candidate dsRNAs. The existence of “off target” binding indicates a dsRNA is capable of specifically binding to one or more non-ApoB gene messages. In certain embodiments, a dsRNA as provided herein (see, e.g., sequences in the Sequence Listing identified herein) applicable to therapeutic use will exhibit a greater stability, minimal interferon response, and little or no “off-target” binding.

[0143] Still further embodiments provide methods for selecting more efficacious dsRNA by using one or more reporter gene constructs comprising a constitutive promoter, such as a cytomegalovirus (CMV) or phosphoglycerate kinase (PGK) promoter, operably fused to, and capable of altering the expression of one or more reporter genes, such as a luciferase, chloramphenicol (CAT), or β-galactosidase, which, in turn, is operably fused in-frame with a dsRNA (such as one having a length between about 15 base-pairs and about 40 base-pairs or from about 5 nucleotides to about 24 nucleotides, or about 25 nucleotides to about 40 nucleotides) that contains an ApoB sequence, as provided herein.

[0144] Individual reporter gene expression constructs may be co-transfected with one or more dsRNA or analog thereof. The capacity of a given dsRNA to reduce the expression level of ApoB may be determined by comparing the measured reporter gene activity in cells transfected with or without a dsRNA molecule of interest.

[0145] Certain embodiments disclosed herein provide methods for selecting one or more modified dsRNA molecule(s) that employ the step of predicting the stability of a dsRNA duplex. In some embodiments, such a prediction is achieved by employing a theoretical melting curve wherein a higher theoretical melting curve indicates an increase in dsRNA duplex stability and a concomitant decrease in cytotoxic effects. Alternatively, stability of a dsRNA duplex may be determined empirically by measuring the hybridization of a single RNA analog strand as described herein to a complementary target gene within, for example, a polynucleotide array. The melting temperature (i.e., the Tₘ value) for each modified RNA and complementary RNA immobilized on the array can be determined and, from this Tₘ value, the relative stability of the modified RNA pairing with a complementary RNA molecule determined.

[0146] For example, Kawase et al. (Nucleic Acids Res. 14:7727, 1986) have described an analysis of the nucleotide-pairing properties of Di (inosine) to A, C, G, and T, which was achieved by measuring the hybridization of oligonucleotides (ODNs) with Di in various positions to complementary sets of ODNs made as an array. The relative strength of nucleotide-pairing is I-C>I-A>I-G≈I-T. Generally, Di containing duplexes showed lower Tₘ values when compared to the corresponding wild type (WT) nucleotide pair. The stabilization of Di by pairing was in order of Dc>Da>Dg>Dt>Du. As a person of skill in the art would understand, although universal-binding nucleotides are used herein as an example of determining duplex stability (i.e., the Tₘ value), other nucleotide substitutions (e.g., 5-methyluridine for uridine) or further modifications (e.g., a ribose modification at the 2′-position) can also be evaluated by these or similar methods.

[0147] In still further embodiments of the presently disclosed methods, one or more anti-codon within an antisense strand of a dsRNA molecule or analog thereof is substituted with a universal-binding nucleotide in a second or third position in the anti-codon of the antisense strand. By substituting a universal-binding nucleotide for a first or second position, the one or more first or second position nucleotide-pair substitution allows the substituted dsRNA molecule to specifically bind to mRNA wherein a first or a second position nucleotide-pair substitution has occurred, wherein the one or more nucleotide-pair substitution results in an amino acid change in the corresponding gene product.

[0148] Any of these methods of identifying dsRNA of interest can also be used to examine a dsRNA that decreases expression of an ApoB gene by RNA interference, comprising a first strand that is complementary to an ApoB mRNA set forth in SEQ ID NO:1158 and a second and third strand that have non-overlapping complementarity to the first strand, wherein the first and at least one of the second or third strand form a double-stranded region of about 5 to about 13 base pairs; wherein at least one pyrimidine of the dsRNA comprises a pyrimidine nucleoside according to Formula I or II:

[chemical structure]

wherein R¹ and R² are each independently a —H, —OH, —OCH₃, —OCH₂OCH₂CH₃, —OCH₂CH₂OCH₃, halogen, substituted or unsubstituted C₁-C₁₀ alkyl, alkoxy, alkoxyalkyl, hydroxyalkyl, carboxyalkyl, alkylsulfonylamino, aminoalkyl, dialkylamino, alkylaminoalkyl, dialkylaminoalkyl, haloalkyl, trifluoromethyl, cycloalkyl, (cycloalkyl)alkyl, substituted or unsubstituted C₂-C₁₀ alkenyl, substituted or unsubstituted —O-allyl, —O—CH₂CH═CH₂, —O—CH═CHCH₃, substituted or unsubstituted C₂-C₁₀ alkynyl, carbamoyl, carbamyl, carboxy, carbonylamino, substituted or unsubstituted aryl, substituted or unsubstituted aralkyl, —NH₂, —NO₂, —C≡N, or heterocyclo group; R³ and R⁴ are each independently a hydroxyl, a protected hydroxyl, or an internucleoside linking group; and R⁵ and R⁸ are independently O or S. In certain embodiments, at least one nucleoside is according to Formula I in which R¹ is methyl and R² is —OH, or R¹ is methyl, R² is —OH, and R⁸ is S. In other embodiments, the internucleoside linking group covalently links from about 5 to about 40 nucleosides.

### Compositions and Methods of Use

[0149] As set forth herein, dsRNA of the instant disclosure are designed to target an ApoB gene (including one or more mRNA splice variant thereof) that is expressed at an elevated level or continues to be expressed when it should not, and is a causal or contributing factor associated with, for example, atherosclerosis, diabetes mellitus, and cerebrovascular disease, state, or adverse condition. In this context, a dsRNA or analog thereof of this disclosure will effectively downregulate expression of an ApoB gene to levels that prevent, alleviate, or reduce the severity or recurrence of one or more associated disease symptoms. Alternatively, for various distinct disease models in which expression of an ApoB gene is not necessarily elevated as a consequence or sequel of disease or other adverse condition, down regulation of an ApoB gene will nonetheless result in a therapeutic result by lowering gene expression (i.e., to reduce levels of a selected mRNA or protein product of an ApoB gene). Furthermore, dsRNAs of this disclosure may be targeted to lower expression of ApoB, which can result in upregulation of a “downstream” gene whose expression is negatively regulated, directly or indirectly, by an ApoB protein. The dsRNA molecules of the instant disclosure comprise useful reagents and can be used in methods for a variety of therapeutic, diagnostic, target validation, genomic discovery, genetic engineering, and pharmacogenomic applications.

[0150] In certain embodiments, aqueous suspensions contain dsRNA of this disclosure in admixture with suitable excipients, such as suspending agents or dispersing or wetting agents. Exemplary suspending agents include sodium carboxymethylcellulose, methylcellulose, hydropropyl-methylcellulose, sodium alginate, polyvinylpyrrolidone, gum tragacanth and gum acacia. Representative dispersing or wetting agents include naturally-occurring phosphatides (e.g., lecithin), condensation products of an alkylene oxide with fatty acids (e.g., polyoxyethylene stearate), condensation products of ethylene oxide with long chain aliphatic alcohols (e.g., heptadecaethyleneoxycetanol), condensation products of ethylene oxide with partial esters derived from fatty acids and hexitol (e.g., polyoxyethylene sorbitol monooleate), or condensation products of ethylene oxide with partial esters derived from fatty acids and hexitol anhydrides (e.g., polyethylene sorbitan monooleate). In certain embodiments, the aqueous suspensions can optionally contain one or more preservatives (e.g., ethyl or n-propyl-p-hydroxybenzoate), one or more coloring agents, one or more flavoring agents, or one or more sweetening agents (e.g., sucrose, saccharin). In additional embodiments, dispersible powders and granules suitable for preparation of an aqueous suspension by the addition of water provide dsRNA of this disclosure in admixture with a dispersing or wetting agent, suspending agent and optionally one or more preservative, coloring agent, flavoring agent, or sweetening agent.

[0151] The present disclosure includes dsRNA compositions prepared for storage or administration that include a pharmaceutically effective amount of a desired compound in a pharmaceutically acceptable carrier or diluent. Acceptable carriers or diluents for therapeutic use are well known in the pharmaceutical art, and are described, for example, in Remington's Pharmaceutical Sciences, Mack Publishing Co., A. R. Gennaro edit., 1985, hereby incorporated by reference herein. In certain embodiments, pharmaceutical compositions of this disclosure can optionally include preservatives, antioxidants, stabilizers, dyes, flavoring agents, or any combination thereof. Exemplary preservatives include sodium benzoate, sorbic acid, chlorobutanol, and esters of p-hydroxybenzoic acid.

[0152] The dsRNA compositions of the instant disclosure can be effectively employed as pharmaceutically-acceptable formulations. Pharmaceutically-acceptable formulations prevent, alter the occurrence or severity of, or treat (alleviate one or more symptom(s) to a detectable or measurable extent) of a disease state or other adverse condition in a subject. A pharmaceutically acceptable formulation includes salts of the above compounds, e.g., acid addition salts, such as salts of hydrochloric acid, hydrobromic acid, acetic acid, or benzene sulfonic acid. A pharmaceutical composition or formulation refers to a composition or formulation in a form suitable for administration into a cell, or a subject such as a human (e.g., systemic administration). The formulations of the present disclosure, having an amount of dsRNA sufficient to treat or prevent a disorder associated with ApoB gene expression are, for example, suitable for topical (e.g., creams, ointments, skin patches, eye drops, ear drops) application or administration. Other routes of administration include oral, parenteral, sublingual, bladder wash-out, vaginal, rectal, enteric, suppository, nasal, and inhalation. The term parenteral, as used herein, includes subcutaneous, intravenous, intramuscular, intraarterial, intraabdominal, intraperitoneal, intraarticular, intraocular or retrobulbar, intraaural, intrathecal, intracavitary, intracelial, intraspinal, intrapulmonary or transpulmonary, intrasynovial, and intraurethral injection or infusion techniques. The pharmaceutical compositions of the present disclosure are formulated to allow the dsRNA contained therein to be bioavailable upon administration to a subject.

[0153] In further embodiments, dsRNA of this disclosure can be formulated as oily suspensions or emulsions (e.g., oil-in-water) by suspending dsRNA in, for example, a vegetable oil (e.g., arachis oil, olive oil, sesame oil or coconut oil) or a mineral oil (e.g., liquid paraffin). Suitable emulsifying agents can be naturally-occurring gums (e.g., gum acacia or gum tragacanth), naturally-occurring phosphatides (e.g., soy bean, lecithin, esters or partial esters derived from fatty acids and hexitol), anhydrides (e.g., sorbitan monooleate), or condensation products of partial esters with ethylene oxide (e.g., polyoxyethylene sorbitan monooleate). In certain embodiments, the oily suspensions or emulsions can optionally contain a thickening agent, such as beeswax, hard paraffin or cetyl alcohol. In related embodiments, sweetening agents and flavoring agents can optionally be added to provide palatable oral preparations. In yet other embodiments, these compositions can be preserved by optionally adding an anti-oxidant, such as ascorbic acid.

[0154] In further embodiments, dsRNA of this disclosure can be formulated as syrups and elixirs with sweetening agents (e.g., glycerol, propylene glycol, sorbitol, glucose or sucrose). Such formulations can also contain a demulcent, preservative, flavoring, coloring agent, or any combination thereof. In other embodiments, pharmaceutical compositions comprising dsRNA of this disclosure can be in the form of a sterile, injectable aqueous or oleaginous suspension. The sterile injectable preparation can also be a sterile, injectable solution or suspension in a non-toxic parenterally acceptable diluent or solvent (e.g., as a solution in 1,3-butanediol). Among the exemplary acceptable vehicles and solvents useful in the compositions of this disclosure is water, Ringer's solution, or isotonic sodium chloride solution. In addition, sterile, fixed oils may be employed as a solvent or suspending medium for the dsRNA of this disclosure. For this purpose, any bland fixed oil can be employed including synthetic mono- or diglycerides. In addition, fatty acids such as oleic acid find use in the preparation of parenteral formulations.

[0155] Within certain embodiments of this disclosure, pharmaceutical compositions and methods are provided that feature the presence or administration of one or more dsRNA or analogs thereof of this disclosure, combined, complexed, or conjugated with a polypeptide, optionally formulated with a pharmaceutically-acceptable carrier, such as a diluent, stabilizer, buffer, or the like. The negatively charged dsRNA molecules of this disclosure may be administered to a patient by any standard means, with or without stabilizers, buffers, or the like, to form a composition suitable for treatment. When it is desired to use a liposome delivery mechanism, standard protocols for formation of liposomes can be followed. The compositions of the present disclosure may also be formulated and used as a tablet, capsule or elixir for oral administration, suppository for rectal administration, sterile solution, or suspension for injectable administration, either with or without other compounds known in the art. Thus, dsRNAs of the present disclosure may be administered in any form, such as nasally, transdermally, parenterally, or by local injection.

[0156] In accordance with this disclosure, dsRNA molecules (optionally substituted or modified or conjugated), compositions thereof, and methods for inhibiting expression of an ApoB gene in a cell or organism are provided. In certain embodiments, this disclosure provides methods and dsRNA compositions for treating a subject, including a human cell, tissue or individual, having a disease or at risk of developing a disease caused by or associated with the expression of an ApoB gene. In one embodiment, the method includes administering a dsRNA of this disclosure or a pharmaceutical composition containing the dsRNA to a cell or an organism, such as a mammal, such that expression of the target gene is silenced. Subjects (e.g., mammalian, human) amendable for treatment using the dsRNA molecules (optionally substituted or modified or conjugated), compositions thereof, and methods of the present disclosure include those suffering from one or more disease or condition mediated, at least in part, by overexpression or inappropriate expression of an ApoB gene, or which are amenable to treatment by reducing expression of an ApoB protein, including coronary artery disease (i.e., coronary heart disease, ischaemic heart disease), atherosclerosis, diabetes mellitus, dyslipidemia (e.g., hyperlipidemia), peripheral vascular and ischemic cerebrovascular disease, and risk of ischemic stroke (cerebral thrombosis and cerebral embolisms) and hemorrhagic stroke (cerebral hemorrhage and subarachnoid hemorrhage). Within exemplary embodiments, the compositions and methods of this disclosure are also useful as therapeutic tools to regulate expression of ApoB to treat or prevent symptoms of, for example, the conditions listed herein.

[0157] In any of the methods disclosed herein there may be used with one or more dsRNA, or substituted or modified dsRNA, as described herein, comprising a first strand that is complementary to a human apolipoprotein B (including Ag(x) antigen) (ApoB) mRNA as set forth in SEQ ID NO:1158, and a second strand and a third strand that is each complementary to non-overlapping regions of the first strand, wherein the second strand and third strands can anneal with the first strand to form at least two double-stranded regions spaced apart by up to 10 nucleotides and thereby forming a gap between the second and third strands, and wherein the mdRNA molecule optionally includes at least one double-stranded region of 5 base pairs to 13 base pairs. In other embodiments, subjects can be effectively treated, prophylactically or therapeutically, by administering an effective amount of one or more dsRNA having a first strand that is complementary to a human apolipoprotein B (including Ag(x) antigen) (ApoB) mRNA as set forth in SEQ ID NO:1158, and a second strand and a third strand that is each complementary to non-overlapping regions of the first strand, wherein the second strand and third strands can anneal with the first strand to form at least two double-stranded regions spaced apart by up to 10 nucleotides and thereby forming a gap between the second and third strands, and wherein the mdRNA molecule optionally includes at least one double-stranded region of 5 base pairs to 13 base pairs and at least one pyrimidine of the mdRNA is substituted with a pyrimidine nucleoside according to Formula I or II:

[chemical structure]

wherein R¹ and R² are each independently a —H, —OH, —OCH₃, —OCH₂OCH₂CH₃, —OCH₂CH₂OCH₃, halogen, substituted or unsubstituted C₁-C₁₀ alkyl, alkoxy, alkoxyalkyl, hydroxyalkyl, carboxyalkyl, alkylsulfonylamino, aminoalkyl, dialkylamino, alkylaminoalkyl, dialkylaminoalkyl, haloalkyl, trifluoromethyl, cycloalkyl, (cycloalkyl)alkyl, substituted or unsubstituted C₂-C₁₀ alkenyl, substituted or unsubstituted —O-allyl, —O—CH₂CH═CH₂, —O—CH═CHCH₃, substituted or unsubstituted C₂-C₁₀ alkynyl, carbamoyl, carbamyl, carboxy, carbonylamino, substituted or unsubstituted aryl, substituted or unsubstituted aralkyl, —NH₂, —NO₂, —C≡N, or heterocyclo group; R³ and R⁴ are each independently a hydroxyl, a protected hydroxyl, or an internucleoside linking group; and R⁵ and R⁸ are independently O or S. In certain embodiments, at least one nucleoside is according to Formula I in which R¹ is methyl and R² is —OH, or R¹ is methyl, R² is —OH, and R⁸ is S. In other embodiments, the internucleoside linking group covalently links from about 5 to about 40 nucleosides.

[0158] In any of the methods described herein, the dsRNA used may include multiple modifications. For example, a dsRNA can have at least one 5-methyluridine, 2′-O-methyl-5-methyluridine, LNA, 2′-methoxy, 2′-fluoro, 2′-deoxy, phosphorothioate linkage, inverted base terminal cap, or any combination thereof. In certain exemplary methods, a dsRNA will have from one to all 5-methyluridines and have up to about 75% LNA. In other exemplary methods, a dsRNA will have from one to all 5-methyluridines and have up to about 75% 2′-methoxy provided the 2′-methoxy are not at the Argonaute cleavage site. In still other exemplary methods, a dsRNA will have from one to all 5-methyluridines and have up to about 100% 2′-fluoro substitutions. In further exemplary methods, a dsRNA will have from one to all 5-methyluridines and have up to about 75% 2′-deoxy. In further exemplary methods, a dsRNA will have up to about 75% LNA and have up to about 75% 2′-methoxy. In still other embodiments, a dsRNA will have up to about 75% LNA and have up to about 100% 2′-fluoro. In further exemplary methods, a dsRNA will have up to about 75% LNA and have up to about 75% 2′-deoxy. In further exemplary methods, a dsRNA will have up to about 75% 2′-methoxy and have up to about 100% 2′-fluoro. In further exemplary methods, a dsRNA will have up to about 75% 2′-methoxy and have up to about 75% 2′-deoxy. In further embodiments, a dsRNA will have up to about 100% 2′-fluoro and have up to about 75% 2′-deoxy.

[0159] In other exemplary methods for using multiply modified dsRNA, a dsRNA will have from one to all uridines substituted with 5-methyluridine, up to about 75% LNA, and up to about 75% 2′-methoxy. In still further exemplary methods, a dsRNA will have from one to all 5-methyluridines, up to about 75% LNA, and up to about 100% 2′-fluoro. In further exemplary methods, a dsRNA will have from one to all 5-methyluridines, up to about 75% LNA, and up to about 75% 2′-deoxy. In further exemplary methods, a dsRNA will have from one to all 5-methyluridines, up to about 75% 2′-methoxy, and up to about 75% 2′-fluoro. In further exemplary methods, a dsRNA will have from one to all 5-methyluridines, up to about 75% 2′-methoxy, and up to about 75% 2′-deoxy. In more exemplary methods, a dsRNA will have from one to all 5-methyluridines, up to about 100% 2′-fluoro, and up to about 75% 2′-deoxy. In yet other exemplary methods, a dsRNA will have from one to all 5-methyluridines, up to about 75% LNA, up to about 75% 2′-methoxy, up to about 100% 2′-fluoro, and up to about 75% 2′-deoxy. In other exemplary methods, a dsRNA will have up to about 75% LNA, up to about 75% 2′-methoxy, and up to about 100% 2′-fluoro. In further exemplary methods, a dsRNA will have up to about 75% LNA, up to about 75% 2′-methoxy, and up to about 75% 2′-deoxy. In more exemplary methods, a dsRNA will have up to about 75% LNA, up to about 100% 2′-fluoro, and up to about 75% 2′-deoxy. In still further exemplary methods, a dsRNA will have up to about 75% 2′-methoxy, up to about 100% 2′-fluoro, and up to about 75% 2′-deoxy.

[0160] In any of these exemplary methods for using multiply modified dsRNA, the dsRNA may further comprise up to 100% phosphorothioate internucleoside linkages, from one to ten or more inverted base terminal caps, or any combination thereof. Additionally, any of these dsRNA may have these multiple modifications on one strand, two strands, three strands, a plurality of strands, or all strands, or on the same or different nucleoside within a dsRNA molecule. Finally, in any of these multiple modification dsRNA, the dsRNA must have gene silencing activity.

[0161] In further embodiments, subjects can be effectively treated, prophylactically or therapeutically, by administering an effective amount of one or more dsRNA, or substituted or modified dsRNA as described herein, having a first strand that is complementary to an ApoB mRNA as set forth in SEQ ID NO:1158, and a second strand and a third strand that is each complementary to non-overlapping regions of the first strand, wherein the second strand and third strands can anneal with the first strand to form at least two double-stranded regions spaced apart by up to 10 nucleotides and thereby forming a gap between the second and third strands, and wherein the combined double-stranded regions total about 15 base pairs to about 40 base pairs and the mdRNA molecule optinally has blunt ends. In still further embodiments, methods disclosed herein there may be used with one or more dsRNA that comprises a first strand that is complementary to an ApoB mRNA as set forth in SEQ ID NO:1158, and a second strand and a third strand that is each complementary to non-overlapping regions of the first strand, wherein the second strand and third strands can anneal with the first strand to form at least two double-stranded regions spaced apart by up to 10 nucleotides and thereby forming a gap between the second and third strands, and wherein the combined double-stranded regions total about 15 base pairs to about 40 base pairs, the mdRNA molecule optionally includes at least one double-stranded region of 5 base pairs to 13 base pairs, or optinally has a blunt end, or any combination thereof, and at least one pyrimidine of the mdRNA is substituted with a pyrimidine nucleoside according to Formula I or II:

[chemical structure]

wherein R¹ and R² are each independently a —H, —OH, —OCH₃, —OCH₂OCH₂CH₃, —OCH₂CH₂OCH₃, halogen, substituted or unsubstituted C₁-C₁₀ alkyl, alkoxy, alkoxyalkyl, hydroxyalkyl, carboxyalkyl, alkylsulfonylamino, aminoalkyl, dialkylamino, alkylaminoalkyl, dialkylaminoalkyl, haloalkyl, trifluoromethyl, cycloalkyl, (cycloalkyl)alkyl, substituted or unsubstituted C₂-C₁₀ alkenyl, substituted or unsubstituted —O-allyl, —O—CH₂CH═CH₂, —O—CH═CHCH₃, substituted or unsubstituted C₂-C₁₀ alkynyl, carbamoyl, carbamyl, carboxy, carbonylamino, substituted or unsubstituted aryl, substituted or unsubstituted aralkyl, —NH₂, —NO₂, —C≡N, or heterocyclo group; R³ and R⁴ are each independently a hydroxyl, a protected hydroxyl, or an internucleoside linking group; and R⁵ and R⁸ are independently O or S. In certain embodiments, at least one nucleoside is according to Formula I in which R¹ is methyl and R² is —OH, or R¹ is methyl, R² is —OH, and R⁸ is S. In certain embodiments, at least one nucleoside is according to Formula I in which R¹ is methyl and R² is —O-methyl, or R¹ is methyl, R² is —O-methyl, and R⁸ is O. In other embodiments, the internucleoside linking group covalently links from about 2 to about 40 nucleosides.

[0162] Within additional aspects of this disclosure, combination formulations and methods are provided comprising an effective amount of one or more dsRNA of the present disclosure in combination with one or more secondary or adjunctive active agents that are formulated together or administered coordinately with the dsRNA of this disclosure to control an ApoB-associated disease or condition as described herein. Useful adjunctive therapeutic agents in these combination formulations and coordinate treatment methods include, for example, enzymatic, allosteric, antisense, decoy, or aptamer nucleic acid molecules; antibodies such as monoclonal antibodies; small molecules and other organic or inorganic compounds including metals, salts and ions; and other drugs and active agents indicated for treating an ApoB-associated disorder, including chemotherapeutic agents used to treat cancer, steroids, tyrosine kinase inhibitors, non-steroidal anti-inflammatory drugs (NSAIDs), or the like.

[0163] Exemplary chemotherapeutic agents include alkylating agents (e.g., cisplatin, oxaliplatin, carboplatin, busulfan, nitrosoureas, nitrogen mustards, uramustine, temozolomide), antimetabolites (e.g., aminopterin, methotrexate, mercaptopurine, fluorouracil, cytarabine), taxanes (e.g., paclitaxel, docetaxel), anthracyclines (e.g., doxorubicin, daunorubicin, epirubicin, idaruicin, mitoxantrone, valrubicin), bleomycin, mytomycin, actinomycin, hydroxyurea, topoisomerase inhibitors (e.g., camptothecin, topotecan, irinotecan, etoposide, teniposide), monoclonal antibodies (e.g., alemtuzumab, bevacizumab, cetuximab, gemtuzumab, panitumumab, rituximab, tositumomab, trastuzumab), vinca alkaloids (e.g., vincristine, vinblastine, vindesine, vinorelbine), cyclophosphamide, prednisone, leucovorin, oxaliplatin.

[0164] Some adjunctive therapies may be directed at targets that interact or associate with ApoB or affect specific ApoB biological activities. Adjunctive therapies include statins (e.g., rosuvastatin, lovastatin, atorvastatin, cerivastatin, fluvastatin, mevastatin, pitavastatin, pravastatin, simvastatin), bile acid-binding resins, stanol and sterol esters from plants, and inhibitors of cholesterol absorption, fibrates (e.g., fenofibrate, bezafibrate, ciprofibrate, clofibrate, gemfibrozil), niacin, fish-oils, ezetimibe, amlodipine, other lipid-altering agents, additional small molecules, rationally designed peptides, and antibodies or fragments thereof.

[0165] To practice the coordinate administration methods of this disclosure, a dsRNA is administered, simultaneously or sequentially, in a coordinated treatment protocol with one or more of the secondary or adjunctive therapeutic agents contemplated herein. The coordinate administration may be done in any order, and there may be a time period while only one or both (or all) active therapeutic agents, individually or collectively, exert their biological activities. A distinguishing aspect of all such coordinate treatment methods is that the dsRNA present in a composition elicits some favorable clinical response, which may or may not be in conjunction with a secondary clinical response provided by the secondary therapeutic agent. For example, the coordinate administration of the dsRNA with a secondary therapeutic agent as contemplated herein can yield an enhanced (synergistic) therapeutic response beyond the therapeutic response elicited by either or both the purified dsRNA or secondary therapeutic agent alone.

[0166] In another embodiment, a dsRNA of this disclosure can include a conjugate member on one or more of the terminal nucleotides of a dsRNA. The conjugate member can be, for example, a lipophile, a terpene, a protein binding agent, a vitamin, a carbohydrate, or a peptide. For example, the conjugate member can be naproxen, nitroindole (or another conjugate that contributes to stacking interactions), folate, ibuprofen, or a C5 pyrimidine linker. In other embodiments, the conjugate member is a glyceride lipid conjugate (e.g., a dialkyl glyceride derivatives), vitamin E conjugates, or thio-cholesterols. Additional conjugate members include peptides that function, when conjugated to a modified dsRNA of this disclosure, to facilitate delivery of the dsRNA into a target cell, or otherwise enhance delivery, stability, or activity of the dsRNA when contacted with a biological sample (e.g., a target cell expressing ApoB). Exemplary peptide conjugate members for use within these aspects of this disclosure, include peptides PN27, PN28, PN29, PN58, PN61, PN73, PN158, PN159, PN173, PN182, PN183, PN202, PN204, PN250, PN361, PN365, PN404, PN453, PN509, and PN963, described, for example, in U.S. Patent Application Publication Nos. 2006/0040882 and 2006/0014289, and U.S. Provisional Patent Application Nos. 60/822,896 and 60/939,578; and PCT Application PCT/US2007/075744, which are all herein incorporated by reference. In certain embodiments, when peptide conjugate partners are used to enhance delivery of dsRNA of this disclosure, the resulting dsRNA formulations and methods will often exhibit further reduction of an interferon response in target cells as compared to dsRNAs delivered in combination with alternate delivery vehicles, such as lipid delivery vehicles (e.g., Lipofectamine™).

[0167] In still another embodiment, a dsRNA or analog thereof of this disclosure may be conjugated to the polypeptide and admixed with one or more non-cationic lipids or a combination of a non-cationic lipid and a cationic lipid to form a composition that enhances intracellular delivery of the dsRNA as compared to delivery resulting from contacting the target cells with a naked dsRNA. In more detailed aspects of this disclosure, the mixture, complex or conjugate comprising a dsRNA and a polypeptide can be optionally combined with (e.g., admixed or complexed with) a cationic lipid, such as Lipofectine™. To produce these compositions comprised of a polypeptide, dsRNA and a cationic lipid, the dsRNA and peptide may be mixed together first in a suitable medium such as a cell culture medium, after which the cationic lipid is added to the mixture to form a dsRNA/delivery peptide/cationic lipid composition. Optionally, the peptide and cationic lipid can be mixed together first in a suitable medium such as a cell culture medium, followed by the addition of the dsRNA to form the dsRNA/delivery peptide/cationic lipid composition.

[0168] This disclosure also features the use of dsRNA compositions comprising surface-modified liposomes containing, for example, poly(ethylene glycol) lipids (PEG-modified, or long-circulating liposomes or stealth liposomes) (Lasic et al., Chem. Rev. 95:2601, 1995; Ishiwata et al., Chem. Pharm. Bull. 43:1005, 1995; Lasic et al., Science 267:1275, 1995; Oku et al., Biochim. Biophys. Acta 1238:86, 1995; Liu et al., J. Biol. Chem. 42:24864, 1995; PCT Publication Nos. WO 96/10391; WO 96/10390; WO 96/10392).

[0169] In another embodiment, compositions are provided for targeting dsRNA molecules of this disclosure to specific cell types, such as hepatocytes. For example, dsRNA can be complexed or conjugated glycoproteins or synthetic glycoconjugates glycoproteins or synthetic glycoconjugates having branched galactose (e.g., asialoorosomucoid), N-acetyl-D-galactosamine, or mannose (see, e.g., Wu and Wu, J. Biol. Chem. 262:4429, 1987; Baenziger and Fiete, Cell 22: 611, 1980; Connolly et al., J. Biol. Chem. 257:939, 1982; Lee and Lee, Glycoconjugate J. 4:317, 1987; Ponpipom et al., J. Med. Chem. 24:1388, 1981) for a targeted delivery to, for example, the liver.

[0170] A pharmaceutically effective dose is that dose required to prevent, inhibit the occurrence of, or treat (alleviate a symptom to some extent, preferably all of the symptoms) a disease state. The pharmaceutically effective dose depends on the type of disease, the composition used, the route of administration, the type of subject being treated, the physical characteristics of the specific subject under consideration for treatment, concurrent medication, and other factors that those skilled in the medical arts will recognize. For example, an amount between 0.1 mg/kg and 100 mg/kg body weight/day of active ingredients may be administered depending on the potency of a dsRNA of this disclosure.

[0171] A specific dose level for any particular patient depends upon a variety of factors including the activity of the specific compound employed, age, body weight, general health, sex, diet, time of administration, route of administration, rate of excretion, drug combination, and the severity of the particular disease undergoing therapy. Following administration of dsRNA compositions as disclosed herein, test subjects will exhibit about a 10% up to about a 99% reduction in one or more symptoms associated with the disease or disorder being treated, as compared to placebo-treated or other suitable control subjects.

[0172] Dosage levels in the order of about 0.1 mg to about 140 mg per kilogram of body weight per day can be useful in the treatment of the above-indicated conditions (about 0.5 mg to about 7 g per patient per day). The amount of active ingredient that can be combined with the carrier materials to produce a single dosage form varies depending upon the host treated and the particular mode of administration. Dosage unit forms generally contain between from about 1 mg to about 500 mg of an active ingredient.

[0173] A dosage form of a dsRNA or composition thereof of this disclosure can be liquid, an emulsion, or a micelle, or in the form of an aerosol or droplets. A dosage form of a dsRNA or composition thereof of this disclosure can be solid, which can be reconstituted in a liquid prior to administration. The solid can be administered as a powder. The solid can be in the form of a capsule, tablet, or gel. In addition to in vivo gene inhibition, a skilled artisan will appreciate that the dsRNA and analogs thereof of the present disclosure are useful in a wide variety of in vitro applications, such as scientific and commercial research (e.g., elucidation of physiological pathways, drug discovery and development), and medical and veterinary diagnostics.

[0174] Exemplary formulations include a dsRNA alone, a dsRNA and a polypeptide complex/conjugate alone, or that further comprise one or more additional components, such as a pharmaceutically acceptable carrier, diluent, excipient, adjuvant, emulsifier, stabilizer, preservative, or the like. Other exemplary substances used to approximate physiological conditions include pH adjusting and buffering agents, tonicity adjusting agents, and wetting agents, for example, sodium acetate, sodium lactate, sodium chloride, potassium chloride, calcium chloride, sorbitan monolaurate, triethanolamine oleate, and mixtures thereof. For solid compositions, nontoxic pharmaceutically acceptable carriers can be used which include, for example, pharmaceutical grades of mannitol, lactose, starch, magnesium stearate, sodium saccharin, talcum, cellulose, glucose, sucrose, magnesium carbonate, and the like.

[0175] In certain embodiments, the dsRNA and compositions thereof can be encapsulated in liposomes, administered by iontophoresis, or incorporated into other vehicles, such as hydrogels, cyclodextrins, biodegradable nanocapsules, bioadhesive microspheres, or proteinaceous vectors (see, e.g., PCT Publication No. WO 00/53722). In certain embodiments of this disclosure, the dsRNA may be administered in a time release formulation, for example, in a composition that includes a slow release polymer. The dsRNA can be prepared with carriers that will protect against rapid release, for example, a controlled release vehicle such as a polymer, microencapsulated delivery system, or bioadhesive gel. Prolonged delivery of the dsRNA, in various compositions of this disclosure can be brought about by including in the composition agents that delay absorption, for example, aluminum monosterate hydrogels and gelatin.

[0176] Alternatively, a dsRNA composition of this disclosure can be delivered locally by direct injection or by use of, e.g., an infusion pump. Direct injection of dsRNAs of this disclosure, whether subcutaneous, intramuscular, or intradermal, can be done by using standard needle and syringe methodologies or by needle-free technologies, such as those described in Conry et al. (Clin. Cancer Res. 5:2330, 1999) and PCT Publication No. WO 99/31262.

[0177] The dsRNA of this disclosure and compositions thereof may be administered to subjects by a variety of mucosal administration modes, including oral, rectal, vaginal, intranasal, intrapulmonary, or transdermal delivery, or by topical delivery to the eyes, ears, skin, or other mucosal surfaces. In one embodiment, the mucosal tissue layer includes an epithelial cell layer, which can be pulmonary, tracheal, bronchial, alveolar, nasal, buccal, epidermal, or gastrointestinal. Compositions of this disclosure can be administered using conventional actuators, such as mechanical spray devices, as well as pressurized, electrically activated, or other types of actuators. The dsRNAs can also be administered in the form of suppositories, e.g., for rectal administration. For example, these compositions can be mixed with an excipient that is solid at room temperature but liquid at the rectal temperature so that the dsRNA is released. Such materials include, for example, cocoa butter and polyethylene glycols.

[0178] Further delivery methods of nucleic acid molecules, such as dsRNAs of this disclosure, are described, e.g., in Boado et al., J. Pharm. Sci. 87:1308, 1998; Tyler et al., FEBS Lett. 421:280, 1999; Pardridge et al., Proc. Nat'l Acad. Sci. USA 92:5592, 1995; Boado, Adv. Drug Delivery Rev. 15:73, 1995; Aldrian-Herrada et al., Nucleic Acids Res. 26:4910, 1998; Tyler et al., Proc. Nat'l Acad. Sci. USA 96:7053, 1999; Akhtar et al., Trends Cell Bio. 2:139, 1992; “Delivery Strategies for Antisense Oligonucleotide Therapeutics,” ed. Akhtar, 1995, Maurer et al., Mol. Membr. Biol. 16:129, 1999; Hofland and Huang, Handb. Exp. Pharmacol 137:165, 1999; and Lee et al., ACS Symp. Ser. 752:184, 2000; PCT Publication No. WO 94/02595.

[0179] All U.S. patents, U.S. patent application publications, U.S. patent applications, foreign patents, foreign patent applications, non-patent publications, figures, tables, and websites referred to in this specification are expressly incorporated herein by reference, in their entirety.

### EXAMPLES

### Example 1

### Knockdown of Gene Expression by mdRNA

[0180] The gene silencing activity of dsRNA as compared to nicked or gapped versions of the same dsRNA was examined using a dual fluorescence assay. A total of 22 different genes were targeted at ten different sites each (see Table 1).

[0181] A Dicer substrate dsRNA molecule was used, which has a 25 nucleotide sense strand, a 27 nucleotide antisense strand, and a two deoxynucleotide overhang at the 3′-end of the antisense strand (referred to as a 25/27 dsRNA). The nicked version of each dsRNA Dicer substrate has a nick at one of positions 9 to 16 on the sense strand as measured from the 5′-end of the sense strand. For example, an ndsRNA having a nick at position 11 has three strands—a 5′-sense strand of 11 nucleotides, a 3′-sense strand of 14 nucleotides, and an antisense strand of 27 nucleotides (which is also referred to as an N11-14/27 mdRNA). In addition, each of the sense strands of the ndsRNA have three locked nucleic acids (LNAs) evenly distributed along each sense fragment. If the nick is at position 9, then the LNAs can be found at positions 2, 6, and 9 of the 5′ sense strand fragment and at positions 11, 18, and 23 of the 3′ sense strand fragment. If the nick is at position 10, then the LNAs can be found at positions 2, 6, and 10 of the 5′ sense strand fragment and at positions 12, 18, and 23 of the 3′ sense strand fragment. If the nick is at position 11, then the LNAs can be found at positions 2, 6, and 11 of the 5′ sense strand fragment and at positions 13, 18, and 23 of the 3′ sense strand fragment. If the nick is at position 12, then the LNAs can be found at positions 2, 6, and 12 of the 5′ sense strand fragment and at positions 14, 18, and 23 of the 3′ sense strand fragment. If the nick is at position 13, then the LNAs can be found at positions 2, 7, and 13 of the 5′ sense strand fragment and at positions 15, 18, and 23 of the 3′ sense strand fragment. If the nick is at position 14, then the LNAs can be found at positions 2, 7, and 14 of the 5′ sense strand fragment and at positions 16, 18, and 23 of the 3′ sense strand fragment. If the nick is at position 15, then the LNAs can be found at positions 2, 8, and 15 of the 5′ sense strand fragment and at positions 17, 19, and 23 of the 3′ sense strand fragment. If the nick is at position 16, then the LNAs can be found at positions 2, 8, and 16 of the 5′ sense strand fragment and at positions 18, 19, and 23 of the 3′ sense strand fragment. Similarly, a gapped version of each dsRNA Dicer substrate has a single nucleotide missing at one of positions 10 to 17 on the sense strand as measured from the 5′-end of the sense strand. For example, a gdsRNA having a gap at position 11 has three strands—a 5′-sense strand of 11 nucleotides, a 3′-sense strand of 13 nucleotides, and an antisense strand of 27 nucleotides (which is also referred to as G11-(1)-13/27 mdRNA). In addition, each of the sense strands of the gdsRNA contain three locked nucleic acids (LNAs) evenly distributed along each sense fragment (as described for the nicked counterparts).

[0182] In sum, three dsRNA were tested at each of the ten different sites per gene—an unmodified dsRNA, a nicked mdRNA with three LNAs per sense strand fragment, and a single nucleotide gapped mdRNA with three LNAs per sense strand fragment. In other words, 660 different dsRNA were examined.

[0183] Briefly, multiwell plates were seeded with about 7−8×10⁵ HeLa cells/well in DMEM having 10% fetal bovine serum, and incubated overnight at 37° C./5% CO₂. The HeLa cell medium was changed to serum-free DMEM just prior to transfection. The psiCHECK™-2 vector, containing about a 1,000 basepair insert of a target gene, diluted in serum-free DMEM was mixed with diluted GenJet™ transfection reagent (SignalDT Biosystems, Hayward, Calif.) according to the manufacturer's instructions and then incubated at room temperature for 10 minutes. The GenJet/psiCHECK™-2-[target gene insert] solution was added to the HeLa cells and then incubated at 37° C., 5% CO₂ for 4.5 hours. After the vector transfection, cells were trypsinized and suspended in antibiotic-free DMEM containing 10% FBS at a concentration of 10⁵ cells per mL.

[0184] To transfect the dsRNA, the dsRNA was formulated in OPTI-MEM I reduced serum medium (Gibco® Invitrogen, Carlsbad, Calif.) and placed in multiwell plates. Then Lipofectamine™ RNAiMAX (Invitrogen) was mixed with OPTI-MEM per manufacture's specifications, added to each well containing dsRNA, mixed manually, and incubated at room temperature for 10-20 minutes. Then 30 μL of vector-transfected HeLa cells at 10⁵ cells per mL were added to each well (final dsRNA concentration of 25 nM), the plates were spun for 30 seconds at 1,000 rpm, and then incubated at 37° C./5% CO₂ for 2 days. The Cell Titer Blue (CTB) reagent (Promega, Madison, Wisconson) was used to assay for cell viability and proliferation—none of the dsRNA showed any substantial toxicity.

[0185] After transfecting, the media and CTB reagent were removed and the wells washed once with 100 PBS. Cells were assayed for firefly and Renilla luciferase reporter activity by first adding Dual-Glo™ Luciferase Reagent (Promega, Madison, Wis.) for 10 minutes with shaking, and then quantitating the luminescent signal on a VICTOR³™1420 Multilabel Counter (PerkinElmer). After measuring the firefly luminescence, Stop & Glob Reagent (Promega, Madison, Wis.) was added for 10 minutes with shaking to simultaneously quench the firefly reaction and initiate the Renilla luciferase reaction, which was then quantitated on a VICTOR³™1420 Multilabel Counter (PerkinElmer). The results are presented in Table 1.

TABLE 1
Gene Silencing Activity* of dsRNA Dicer Substrate and mdRNA (nicked or gapped) Dicer Substrate

| | | | Dicer | | | | Nicked | | | Gapped | | |
|---|---|---|---|---|---|---|---|---|---|---|---|---|
| | | | SEQ ID | Dicer | Dicer | Nicked | Mean | Nicked | Gapped | Mean | Gapped | Length |
| Set | Target | Pos† | NOS‡ | Mean (%) | 95% CI | SEQ ID NOS | (%) | 95% CI | SEQ ID NOS | (%) | 95% CI | 5′-S\hat{ } |
| 1 | AKT1 | 1862 | 63, 283 | 20.6 | 4.0% | 503, 723, 283 | 23.5 | 5.7% | 503, 940, 283 | 54.3 | 12.0% | 14 |
| 2 | AKT1 | 1883 | 64, 284 | 29.7 | 7.3% | 504, 724, 284 | 51.4 | 6.7% | 504, 941, 284 | 76.9 | 19.5% | 12 |
| 3 | AKT1 | 2178 | 65, 285 | 15.4 | 2.4% | 505, 725, 285 | 22.3 | 6.4% | 505, 942, 285 | 24.4 | 5.1% | 14 |
| 4 | AKT1 | 2199 | 66, 286 | 26.4 | 3.6% | 506, 726, 286 | 62.7 | 6.6% | 506, 943, 286 | 66.8 | 10.8% | 15 |
| 5 | AKT1 | 2264 | 67, 287 | 35.2 | 7.3% | 507, 727, 287 | 34.1 | 7.3% | 507, 944, 287 | 31.3 | 5.2% | 12 |
| 6 | AKT1 | 2580 | 68, 288 | 27.6 | 5.7% | 508, 728, 288 | 40.1 | 8.3% | 508, 945, 288 | 91.5 | 17.0% | 12 |
| 7 | AKT1 | 2606 | 69, 289 | 14.0 | 2.6% | 509, 729, 289 | 14.9 | 3.2% | 509, 946, 289 | 33.4 | 6.9% | 11 |
| 8 | AKT1 | 2629 | 70, 290 | 21.0 | 10.1% | 510, 730, 290 | 13.5 | 2.4% | 510, 947, 290 | 13.6 | 2.1% | 12 |
| 9 | AKT1 | 2661 | 71, 291 | 37.4 | 6.6% | 511, 731, 291 | 41.0 | 12.1% | 511, 948, 291 | 71.6 | 11.9% | 15 |
| 10 | AKT1 | 2663 | 72, 292 | 18.1 | 4.3% | 512, 732, 292 | 23.0 | 5.9% | 512, 949, 292 | 51.4 | 9.2% | 14 |
| 11 | BCR-ABL (b2a2) | 66 | 73, 293 | 16.9 | 5.9% | 513, 733, 293 | 30.4 | 10.5% | 513, 950, 293 | 38.2 | 11.7% | 13 |
| 12 | BCR-ABL (b2a2) | 190 | 74, 294 | 40.0 | 11.6% | 514, 734, 294 | 22.0 | 6.4% | 514, 951, 294 | 34.6 | 12.0% | 14 |
| 13 | BCR-ABL (b2a2) | 282 | 75, 295 | 24.2 | 5.2% | 515, 735, 295 | 37.6 | 8.2% | 515, 952, 295 | 34.6 | 8.6% | 13 |
| 14 | BCR-ABL (b2a2) | 284 | 76, 296 | 50.9 | 6.9% | 516, 736, 296 | 38.3 | 7.8% | 516, 953, 296 | 68.3 | 18.0% | 13 |
| 15 | BCR-ABL (b2a2) | 287 | 77, 297 | 45.5 | 13.2% | 517, 737, 297 | 39.6 | 11.5% | 517, 954, 297 | 75.2 | 17.2% | 14 |
| 16 | BCR-ABL (b2a2) | 289 | 78, 298 | 36.9 | 7.7% | 518, 738, 298 | 40.0 | 8.9% | 518, 955, 298 | 60.9 | 12.3% | 14 |
| 17 | BCR-ABL (b2a2) | 293 | 79, 299 | 55.9 | 9.8% | 519, 739, 299 | 58.6 | 14.7% | 519, 956, 299 | 87.0 | 14.3% | 13 |
| 18 | BCR-ABL (b2a2) | 461 | 80, 300 | 38.4 | 9.4% | 520, 740, 300 | 35.9 | 12.1% | 520, 957, 300 | 28.6 | 10.2% | 13 |
| 19 | BCR-ABL (b2a2) | 462 | 81, 301 | 31.1 | 13.7% | 521, 741, 301 | 26.5 | 5.5% | 521, 958, 301 | 35.8 | 10.7% | 14 |
| 20 | BCR-ABL (b2a2) | 561 | 82, 302 | 17.7 | 3.4% | 522, 742, 302 | 20.7 | 3.4% | 522, 959, 302 | 35.5 | 10.6% | 12 |
| 21 | BCR-ABL (b3a2) | 352 | 83, 303 | 45.4 | 7.0% | 523, 743, 303 | 39.8 | 8.3% | 523, 960, 303 | 45.5 | 11.0% | 12 |
| 22 | BCR-ABL (b3a2) | 353 | 84, 304 | 22.6 | 1.8% | 524, 744, 304 | 20.5 | 5.1% | 524, 961, 304 | 66.1 | 17.8% | 12 |
| 23 | BCR-ABL (b3a2) | 356 | 85, 305 | 11.9 | 2.5% | 525, 745, 305 | 28.4 | 5.8% | 525, 962, 305 | 56.0 | 10.6% | 13 |
| 24 | BCR-ABL (b3a2) | 357 | 86, 306 | 24.5 | 6.0% | 526, 746, 306 | 25.6 | 7.5% | 526, 963, 306 | 39.2 | 10.0% | 13 |
| 25 | BCR-ABL (b3a2) | 359 | 87, 307 | 56.8 | 9.3% | 527, 747, 307 | 42.4 | 7.3% | 527, 964, 307 | 46.4 | 9.5% | 13 |
| 26 | BCR-ABL (b3a2) | 360 | 88, 308 | 32.3 | 5.0% | 528, 748, 308 | 37.2 | 7.3% | 528, 965, 308 | 55.3 | 13.8% | 13 |
| 27 | BCR-ABL (b3a2) | 362 | 89, 309 | 12.4 | 3.2% | 529, 737, 309 | 26.3 | 9.8% | 529, 954, 309 | 46.2 | 8.3% | 14 |
| 28 | BCR-ABL (b3a2) | 410 | 90, 310 | 66.2 | 12.2% | 530, 749, 310 | 55.9 | 11.2% | 530, 966, 310 | 58.4 | 16.4% | 12 |
| 29 | BCR-ABL (b3a2) | 629 | 91, 311 | 35.0 | 11.7% | 531, 750, 311 | 46.5 | 10.1% | 531, 967, 311 | 41.0 | 9.0% | 13 |
| 30 | BCR-ABL (b3a2) | 727 | 92, 312 | 83.4 | 13.6% | 532, 751, 312 | 76.7 | 22.5% | 532, 968, 312 | 62.9 | 10.9% | 12 |
| 31 | EGFR | 4715 | 93, 313 | 15.3 | 2.2% | 533, 752, 313 | 9.4 | 0.9% | 533, 969, 313 | 11.3 | 1.7% | 11 |
| 32 | EGFR | 4759 | 94, 314 | 3.8 | 0.4% | 534, 753, 314 | 6.3 | 0.8% | 534, 970, 314 | 8.4 | 1.1% | 12 |
| 33 | EGFR | 4810 | 95, 315 | 5.2 | 0.6% | 535, 754, 315 | 5.8 | 0.7% | 535, 971, 315 | 7.2 | 1.0% | 13 |
| 34 | EGFR | 5249 | 96, 316 | 2.6 | 0.4% | 536, 755, 316 | 16.6 | 1.8% | 536, 972, 316 | 42.9 | 3.5% | 14 |
| 35 | EGFR | 5279 | 97, 317 | 7.6 | 1.0% | 537, 756, 317 | 10.6 | 1.1% | 537, 973, 317 | 11.8 | 1.7% | 13 |
| 36 | EGFR | 5374 | 98, 318 | 9.6 | 1.0% | 538, 757, 318 | 8.7 | 0.9% | 538, 974, 318 | 34.7 | 4.3% | 12 |
| 37 | EGFR | 5442 | 99, 319 | 4.1 | 0.8% | 539, 758, 319 | 15.1 | 1.8% | 539, 975, 319 | 19.7 | 2.4% | 12 |
| 38 | EGFR | 5451 | 100, 320 | 5.1 | 0.3% | 540, 759, 320 | 11.5 | 1.3% | 540, 976, 320 | 16.5 | 3.0% | 13 |
| 39 | EGFR | 5469 | 101, 321 | 5.6 | 0.8% | 541, 760, 321 | 5.1 | 0.5% | 541, 977, 321 | 12.2 | 2.5% | 13 |
| 40 | EGFR | 5483 | 102, 322 | 2.2 | 0.4% | 542, 761, 322 | 2.4 | 0.5% | 542, 978, 322 | 6.1 | 0.7% | 9 |
| 41 | FLT1 | 863 | 103, 323 | 7.6 | 1.1% | 543, 762, 323 | 10.2 | 3.3% | 543, 979, 323 | 29.2 | 8.1% | 12 |
| 42 | FLT1 | 906 | 104, 324 | 10.0 | 2.4% | 544, 763, 324 | 10.8 | 0.8% | 544, 980, 324 | 12.4 | 2.1% | 12 |
| 43 | FLT1 | 993 | 105, 325 | 12.2 | 2.5% | 545, 764, 325 | 13.7 | 2.8% | 545, 981, 325 | 20.0 | 11.3% | 13 |
| 44 | FLT1 | 1283 | 106, 326 | 19.6 | 4.5% | 546, 765, 326 | 25.8 | 7.3% | 546, 982, 326 | 18.7 | 6.5% | 12 |
| 45 | FLT1 | 1289 | 107, 327 | 15.5 | 2.0% | 547, 766, 327 | 13.5 | 1.6% | 547, 983, 327 | 22.5 | 5.0% | 12 |
| 46 | FLT1 | 1349 | 108, 328 | 36.8 | 4.2% | 548, 767, 328 | 22.9 | 4.0% | 548, 984, 328 | 52.7 | 5.4% | 14 |
| 47 | FLT1 | 1354 | 109, 329 | 36.6 | 4.0% | 549, 768, 329 | 49.7 | 5.9% | 549, 985, 329 | 45.8 | 9.3% | 14 |
| 48 | FLT1 | 1448 | 110, 330 | 9.3 | 2.5% | 550, 769, 330 | 16.1 | 2.9% | 550, 986, 330 | 24.2 | 3.6% | 13 |
| 49 | FLT1 | 1459 | 111, 331 | 13.7 | 3.6% | 551, 770, 331 | 20.0 | 8.7% | 551, 987, 331 | 22.4 | 4.4% | 12 |
| 50 | FLT1 | 1700 | 112, 332 | 7.9 | 2.2% | 552, 771, 332 | 11.2 | 3.7% | 552, 988, 332 | 36.4 | 8.0% | 13 |
| 51 | FRAP1 | 7631 | 113, 333 | 9.5 | 2.7% | 553, 772, 333 | 23.3 | 4.9% | 553, 989, 333 | 61.8 | 18.3% | 13 |
| 52 | FRAP1 | 7784 | 114, 334 | 15.1 | 1.7% | 554, 773, 334 | 19.9 | 2.8% | 554, 990, 334 | 29.3 | 3.4% | 12 |
| 53 | FRAP1 | 7812 | 115, 335 | 11.9 | 2.9% | 555, 774, 335 | 14.4 | 3.2% | 555, 991, 335 | 28.3 | 12.7% | 11 |
| 54 | FRAP1 | 7853 | 116, 336 | 16.8 | 3.3% | 556, 775, 336 | 24.1 | 3.7% | 556, 992, 336 | 67.5 | 9.2% | 11 |
| 55 | FRAP1 | 8018 | 117, 337 | 41.1 | 9.1% | 557, 776, 337 | 19.8 | 3.3% | 557, 993, 337 | 41.8 | 9.6% | 12 |
| 56 | FRAP1 | 8102 | 118, 338 | 35.7 | 5.1% | 558, 777, 338 | 30.2 | 6.3% | 558, 994, 338 | 39.5 | 9.9% | 12 |
| 57 | FRAP1 | 8177 | 119, 339 | 21.2 | 3.9% | 559, 778, 339 | 33.2 | 9.3% | 559, 995, 339 | 47.3 | 12.3% | 14 |
| 58 | FRAP1 | 8348 | 120, 340 | 25.8 | 3.6% | 560, 779, 340 | 26.8 | 4.4% | 560, 996, 340 | 37.4 | 4.7% | 11 |
| 59 | FRAP1 | 8435 | 121, 341 | 41.1 | 6.7% | 561, 780, 341 | 54.1 | 9.5% | 561, 997, 341 | 74.9 | 8.5% | 12 |
| 60 | FRAP1 | 8542 | 122, 342 | 23.1 | 4.8% | 562, 781, 342 | 16.5 | 5.5% | 562, 998, 342 | 33.6 | 6.4% | 10 |
| 61 | HIF1A | 1780 | 123, 343 | 76.6 | 14.9% | 563, 782, 343 | 89.2 | 11.9% | 563, 999, 343 | 86.3 | 9.3% | 12 |
| 62 | HIF1A | 1831 | 124, 344 | 9.0 | 0.6% | 564, 783, 344 | 14.0 | 2.3% | 564, 1000, 344 | 38.2 | 8.5% | 12 |
| 63 | HIF1A | 1870 | 125, 345 | 21.4 | 4.5% | 565, 784, 345 | 21.2 | 3.3% | 565, 1001, 345 | 19.6 | 2.2% | 13 |
| 64 | HIF1A | 1941 | 126, 346 | 8.9 | 2.1% | 566, 785, 346 | 11.4 | 2.2% | 566, 1002, 346 | 11.7 | 2.5% | 12 |
| 65 | HIF1A | 2068 | 127, 347 | 7.8 | 1.5% | 567, 786, 347 | 7.0 | 1.4% | 567, 1003, 347 | 16.9 | 3.9% | 12 |
| 66 | HIF1A | 2133 | 128, 348 | 13.0 | 2.0% | 568, 787, 348 | 16.7 | 3.1% | 568, 1004, 348 | 16.3 | 3.1% | 10 |
| 67 | HIF1A | 2232 | 129, 349 | 8.6 | 2.0% | 569, 788, 349 | 17.4 | 3.6% | 569, 1005, 349 | 37.8 | 9.6% | 13 |
| 68 | HIF1A | 2273 | 130, 350 | 19.1 | 5.3% | 570, 789, 350 | 23.4 | 4.4% | 570, 1006, 350 | 20.3 | 3.4% | 12 |
| 69 | HIF1A | 2437 | 131, 351 | 8.2 | 1.4% | 571, 790, 351 | 47.7 | 11.5% | 571, 1007, 351 | 72.4 | 14.3% | 13 |
| 70 | HIF1A | 2607 | 132, 352 | 8.0 | 2.1% | 572, 791, 352 | 11.0 | 1.2% | 572, 1008, 352 | 33.6 | 6.0% | 13 |
| 71 | IL17A | 923 | 133, 353 | 5.0 | 0.6% | 573, 792, 353 | 7.3 | 0.7% | 573, 1009, 353 | 26.3 | 2.5% | 12 |
| 72 | IL17A | 962 | 134, 354 | 6.7 | 0.8% | 574, 793, 354 | 7.7 | 0.9% | 574, 1010, 354 | 8.9 | 2.0% | 13 |
| 73 | IL17A | 969 | 135, 355 | 8.9 | 1.7% | 575, 794, 355 | 17.1 | 1.6% | 575, 1011, 355 | 49.5 | 4.3% | 14 |
| 74 | IL17A | 1098 | 136, 356 | 7.2 | 1.3% | 576, 795, 356 | 10.0 | 2.4% | 576, 1012, 356 | 15.4 | 2.8% | 12 |
| 75 | IL17A | 1201 | 137, 357 | 14.1 | 2.2% | 577, 796, 357 | 13.4 | 1.1% | 577, 1013, 357 | 17.2 | 2.8% | 12 |
| 76 | IL17A | 1433 | 138, 358 | 107.1 | 9.7% | 578, 797, 358 | 111.5 | 10.4% | 578, 1014, 358 | 108.1 | 8.8% | 13 |
| 77 | IL17A | 1455 | 139, 359 | 115.4 | 11.1% | 579, 798, 359 | 120.8 | 8.7% | 579, 1015, 359 | 120.3 | 9.9% | 12 |
| 78 | IL17A | 1478 | 140, 360 | 82.7 | 6.3% | 580, 799, 360 | 87.6 | 5.0% | 580, 1016, 360 | 95.9 | 5.6% | 14 |
| 79 | IL17A | 1663 | 141, 361 | 140.2 | 7.8% | 581, 800, 361 | 125.9 | 9.8% | 581, 1017, 361 | 114.7 | 10.1% | 14 |
| 80 | IL17A | 1764 | 142, 362 | 114.3 | 9.2% | 582, 801, 362 | 109.4 | 2.9% | 582, 1018, 362 | 105.7 | 8.1% | 15 |
| 81 | IL18 | 210 | 143, 363 | 13.8 | 2.8% | 583, 802, 363 | 23.9 | 5.8% | 583, 1019, 363 | 21.4 | 5.7% | 14 |
| 82 | IL18 | 368 | 144, 364 | 22.5 | 1.8% | 584, 803, 364 | 21.0 | 2.0% | 584, 1020, 364 | 29.7 | 3.7% | 13 |
| 83 | IL18 | 479 | 145, 365 | 88.1 | 12.9% | 585, 804, 365 | 66.3 | 9.8% | 585, 1021, 365 | 80.0 | 16.8% | 14 |
| 84 | IL18 | 508 | 146, 366 | 8.0 | 1.9% | 586, 805, 366 | 15.7 | 3.5% | 586, 1022, 366 | 17.0 | 5.7% | 12 |
| 85 | IL18 | 521 | 147, 367 | 9.9 | 2.1% | 587, 806, 367 | 10.8 | 2.1% | 587, 1023, 367 | 18.4 | 3.3% | 11 |
| 86 | IL18 | 573 | 148, 368 | 18.6 | 4.7% | 588, 807, 368 | 24.8 | 7.6% | 588, 1024, 368 | 48.8 | 7.7% | 14 |
| 87 | IL18 | 605 | 149, 369 | 27.5 | 6.1% | 589, 808, 369 | 21.3 | 3.9% | 589, 1025, 369 | 14.9 | 2.7% | 13 |
| 88 | IL18 | 663 | 150, 370 | 5.3 | 1.0% | 590, 809, 370 | 8.2 | 1.5% | 590, 1026, 370 | 11.7 | 3.4% | 12 |
| 89 | IL18 | 785 | 151, 371 | 8.6 | 1.0% | 591, 810, 371 | 11.7 | 2.8% | 591, 1027, 371 | 21.1 | 9.1% | 12 |
| 90 | IL18 | 918 | 152, 372 | 13.9 | 1.6% | 592, 811, 372 | 15.0 | 3.0% | 592, 1028, 372 | 30.4 | 3.6% | 11 |
| 91 | IL6 | 24 | 153, 373 | 22.6 | 1.7% | 593, 812, 373 | 45.7 | 7.8% | 593, 1029, 373 | 47.8 | 4.5% | 13 |
| 92 | IL6 | 74 | 154, 374 | 52.5 | 12.6% | 594, 813, 374 | 56.4 | 7.1% | 594, 1030, 374 | 88.3 | 15.5% | 12 |
| 93 | IL6 | 160 | 155, 375 | 49.8 | 7.8% | 595, 814, 375 | 50.6 | 6.1% | 595, 1031, 375 | 68.3 | 9.4% | 14 |
| 94 | IL6 | 370 | 156, 376 | 44.7 | 8.2% | 596, 815, 376 | 52.5 | 4.2% | 596, 1032, 376 | 74.3 | 9.3% | 13 |
| 95 | IL6 | 451 | 157, 377 | 39.3 | 5.0% | 597, 816, 377 | 35.6 | 4.1% | 597, 1033, 377 | 66.6 | 7.1% | 13 |
| 96 | IL6 | 481 | 158, 378 | 68.3 | 8.1% | 598, 817, 378 | 78.7 | 15.6% | 598, 1034, 378 | 63.2 | 6.2% | 11 |
| 97 | IL6 | 710 | 159, 379 | 29.2 | 4.2% | 599, 818, 379 | 32.0 | 4.1% | 599, 1035, 379 | 77.3 | 11.4% | 12 |
| 98 | IL6 | 822 | 160, 380 | 73.7 | 11.0% | 600, 819, 380 | 72.2 | 11.6% | 600, 1036, 380 | 85.2 | 13.3% | 12 |
| 99 | IL6 | 836 | 161, 381 | 98.8 | 21.8% | 601, 820, 381 | 95.0 | 13.2% | 601, 1037, 381 | 90.5 | 15.6% | 13 |
| 100 | IL6 | 960 | 162, 382 | 31.1 | 4.4% | 602, 821, 382 | 20.5 | 6.1% | 602, 1038, 382 | 25.6 | 2.4% | 12 |
| 101 | MAP2K1 | 1237 | 163, 383 | 21.0 | 3.3% | 603, 822, 383 | 27.9 | 3.8% | 603, 1039, 383 | 50.0 | 8.8% | 11 |
| 102 | MAP2K1 | 1342 | 164, 384 | 3.9 | 0.5% | 604, 823, 384 | 8.7 | 1.5% | 604, 1040, 384 | 11.4 | 1.3% | 13 |
| 103 | MAP2K1 | 1501 | 165, 385 | 12.9 | 1.9% | 605, 824, 385 | 19.4 | 2.9% | 605, 1041, 385 | 19.7 | 5.3% | 12 |
| 104 | MAP2K1 | 1542 | 166, 386 | 7.2 | 1.3% | 606, 825, 386 | 11.7 | 2.1% | 606, 1042, 386 | 18.7 | 3.2% | 11 |
| 105 | MAP2K1 | 1544 | 167, 387 | 13.1 | 2.1% | 607, 826, 387 | 11.1 | 1.1% | 607, 1043, 387 | 16.5 | 3.0% | 10 |
| 106 | MAP2K1 | 1728 | 168, 388 | 11.9 | 1.7% | 608, 827, 388 | 11.9 | 1.0% | 608, 1044, 388 | 27.9 | 4.3% | 13 |
| 107 | MAP2K1 | 1777 | 169, 389 | 18.3 | 2.8% | 609, 828, 389 | 37.2 | 4.3% | 609, 1045, 389 | 64.5 | 8.5% | 13 |
| 108 | MAP2K1 | 1892 | 170, 390 | 34.5 | 4.7% | 610, 829, 390 | 37.6 | 6.8% | 610, 1046, 390 | 42.4 | 7.3% | 12 |
| 109 | MAP2K1 | 1954 | 171, 391 | 4.6 | 0.5% | 611, 830, 391 | 4.2 | 0.5% | 611, 1047, 391 | 6.5 | 1.1% | 13 |
| 110 | MAP2K1 | 2062 | 172, 392 | 10.2 | 0.8% | 612, 831, 392 | 10.4 | 2.9% | 612, 1048, 392 | 12.2 | 2.0% | 12 |
| 111 | MAPK1 | 3683 | 173, 393 | 7.0 | 0.9% | 613, 614, 393 | 24.4 | 17.3% | 613, 1049, 393 | 25.2 | 2.6% | 12 |
| 112 | MAPK1 | 3695 | 174, 394 | 32.9 | 4.6% | 614, 832, 394 | 30.9 | 4.0% | 614, 1050, 394 | 33.8 | 3.1% | 13 |
| 113 | MAPK1 | 3797 | 175, 395 | 7.4 | 1.1% | 615, 833, 395 | 6.4 | 1.3% | 615, 1051, 395 | 40.4 | 5.8% | 11 |
| 114 | MAPK1 | 3905 | 176, 396 | 8.0 | 1.0% | 616, 834, 396 | 8.1 | 0.5% | 616, 1052, 396 | 14.8 | 1.4% | 12 |
| 115 | MAPK1 | 3916 | 177, 397 | 11.0 | 1.7% | 617, 835, 397 | 16.0 | 3.3% | 617, 1053, 397 | 45.5 | 8.1% | 10 |
| 116 | MAPK1 | 3943 | 178, 398 | 6.8 | 0.8% | 618, 836, 398 | 6.6 | 0.7% | 618, 1054, 398 | 11.0 | 2.3% | 10 |
| 117 | MAPK1 | 4121 | 179, 399 | 7.6 | 1.1% | 619, 837, 399 | 12.7 | 1.6% | 619, 1055, 399 | 25.1 | 3.1% | 12 |
| 118 | MAPK1 | 4256 | 180, 400 | 27.6 | 2.5% | 620, 838, 400 | 36.8 | 4.0% | 620, 1056, 400 | 57.7 | 7.0% | 13 |
| 119 | MAPK1 | 4294 | 181, 401 | 31.0 | 3.0% | 621, 839, 401 | 22.3 | 3.6% | 621, 1057, 401 | 50.9 | 4.6% | 12 |
| 120 | MAPK1 | 4375 | 182, 402 | 10.9 | 1.1% | 622, 840, 402 | 12.4 | 1.4% | 622, 1058, 402 | 16.9 | 2.7% | 11 |
| 121 | MAPK14 | 2715 | 183, 403 | 11.4 | 2.8% | 623, 841, 403 | 16.5 | 4.1% | 623, 1059, 403 | 16.6 | 2.4% | 12 |
| 122 | MAPK14 | 2737 | 184, 404 | 7.5 | 0.8% | 624, 842, 404 | 10.3 | 1.1% | 624, 1060, 404 | 13.1 | 1.2% | 11 |
| 123 | MAPK14 | 2750 | 185, 405 | 8.7 | 1.0% | 625, 843, 405 | 12.2 | 1.8% | 625, 1061, 405 | 15.8 | 1.9% | 13 |
| 124 | MAPK14 | 2817 | 186, 406 | 6.4 | 0.8% | 626, 844, 406 | 14.6 | 1.7% | 626, 1062, 406 | 19.4 | 2.0% | 11 |
| 125 | MAPK14 | 3091 | 187, 407 | 9.9 | 0.6% | 627, 845, 407 | 10.3 | 1.3% | 627, 1063, 407 | 24.7 | 1.5% | 11 |
| 126 | MAPK14 | 3312 | 188, 408 | 20.4 | 1.8% | 628, 846, 408 | 30.5 | 2.9% | 628, 1064, 408 | 38.5 | 3.4% | 13 |
| 127 | MAPK14 | 3346 | 189, 409 | 20.9 | 1.6% | 629, 847, 409 | 23.0 | 2.6% | 629, 1065, 409 | 58.3 | 6.7% | 11 |
| 128 | MAPK14 | 3531 | 190, 410 | 42.4 | 3.2% | 630, 848, 410 | 55.1 | 5.0% | 630, 1066, 410 | 61.9 | 3.6% | 12 |
| 129 | MAPK14 | 3621 | 191, 411 | 28.6 | 1.9% | 631, 849, 411 | 42.4 | 13.5% | 631, 1067, 411 | 71.9 | 5.2% | 11 |
| 130 | MAPK14 | 3680 | 192, 412 | 15.6 | 1.3% | 632, 850, 412 | 15.5 | 1.9% | 632, 1068, 412 | 19.8 | 2.1% | 12 |
| 131 | PDGFA | 1322 | 193, 413 | 23.7 | 3.6% | 633, 851, 413 | 31.6 | 4.3% | 633, 1069, 413 | 38.4 | 3.3% | 12 |
| 132 | PDGFA | 1332 | 194, 414 | 35.5 | 5.4% | 634, 852, 414 | 48.4 | 3.0% | 634, 1070, 414 | 65.4 | 10.5% | 14 |
| 133 | PDGFA | 1395 | 195, 415 | 25.9 | 3.3% | 635, 853, 415 | 40.2 | 6.0% | 635, 1071, 415 | 55.2 | 9.8% | 14 |
| 134 | PDGFA | 1669 | 196, 416 | 40.4 | 5.1% | 636, 854, 416 | 29.5 | 4.3% | 636, 1072, 416 | 33.9 | 5.9% | 12 |
| 135 | PDGFA | 1676 | 197, 417 | 27.1 | 2.5% | 637, 855, 417 | 36.8 | 4.5% | 637, 1073, 417 | 47.4 | 3.4% | 13 |
| 136 | PDGFA | 1748 | 198, 418 | 27.4 | 4.7% | 638, 856, 418 | 34.5 | 5.0% | 638, 1074, 418 | 47.5 | 4.7% | 11 |
| 137 | PDGFA | 2020 | 199, 419 | 31.6 | 6.6% | 639, 857, 419 | 37.5 | 4.3% | 639, 1075, 419 | 51.9 | 5.0% | 13 |
| 138 | PDGFA | 2021 | 200, 420 | 16.7 | 1.0% | 640, 858, 420 | 24.2 | 3.1% | 640, 1076, 420 | 62.6 | 6.9% | 14 |
| 139 | PDGFA | 2030 | 201, 421 | 38.7 | 6.2% | 641, 859, 421 | 47.0 | 10.5% | 641, 1077, 421 | 80.5 | 7.6% | 13 |
| 140 | PDGFA | 2300 | 202, 422 | 55.3 | 7.7% | 642, 860, 422 | 41.2 | 4.7% | 642, 1078, 422 | 71.7 | 9.1% | 15 |
| 141 | PDGFRA | 4837 | 203, 423 | 16.9 | 3.1% | 643, 861, 423 | 21.1 | 5.1% | 643, 1079, 423 | 23.1 | 4.8% | 12 |
| 142 | PDGFRA | 4900 | 204, 424 | 23.8 | 3.8% | 644, 862, 424 | 40.9 | 8.4% | 644, 1080, 424 | 62.5 | 12.5% | 16 |
| 143 | PDGFRA | 5007 | 205, 425 | 52.6 | 9.4% | 645, 863, 425 | 49.6 | 7.7% | 645, 1081, 425 | 47.0 | 9.5% | 12 |
| 144 | PDGFRA | 5043 | 206, 426 | 30.1 | 7.9% | 646, 864, 426 | 30.0 | 5.4% | 646, 1082, 426 | 57.3 | 7.8% | 11 |
| 145 | PDGFRA | 5082 | 207, 427 | 8.3 | 1.1% | 647, 865, 427 | 11.9 | 1.8% | 647, 1083, 427 | 18.2 | 4.0% | 13 |
| 146 | PDGFRA | 5352 | 208, 428 | 6.3 | 1.4% | 648, 866, 428 | 8.2 | 1.6% | 648, 1084, 428 | 7.9 | 1.1% | 12 |
| 147 | PDGFRA | 5367 | 209, 429 | 19.1 | 5.6% | 649, 867, 429 | 10.9 | 1.6% | 649, 1085, 429 | 25.1 | 2.9% | 14 |
| 148 | PDGFRA | 5496 | 210, 430 | 18.9 | 5.4% | 650, 868, 430 | 17.0 | 2.9% | 650, 1086, 430 | 17.8 | 4.0% | 12 |
| 149 | PDGFRA | 5706 | 211, 431 | 24.5 | 4.0% | 651, 869, 431 | 47.8 | 4.3% | 651, 1087, 431 | 50.6 | 5.5% | 13 |
| 150 | PDGFRA | 5779 | 212, 432 | 13.0 | 1.4% | 652, 870, 432 | 14.0 | 2.1% | 652, 1088, 432 | 17.2 | 4.3% | 14 |
| 151 | PIK3CA | 213 | 213, 433 | 4.3 | 1.0% | 653, 871, 433 | 3.7 | 0.6% | 653, 1089, 433 | 5.7 | 0.9% | 12 |
| 152 | PIK3CA | 389 | 214, 434 | 5.3 | 1.0% | 654, 872, 434 | 7.0 | 1.5% | 654, 1090, 434 | 5.6 | 1.5% | 10 |
| 153 | PIK3CA | 517 | 215, 435 | 9.6 | 1.1% | 655, 873, 435 | 11.5 | 2.1% | 655, 1091, 435 | 13.5 | 1.6% | 11 |
| 154 | PIK3CA | 630 | 216, 436 | 6.1 | 1.2% | 656, 874, 436 | 8.9 | 2.6% | 656, 1092, 436 | 9.3 | 1.8% | 12 |
| 155 | PIK3CA | 680 | 217, 437 | 3.8 | 0.3% | 657, 875, 437 | 5.9 | 0.6% | 657, 1093, 437 | 6.9 | 1.0% | 11 |
| 156 | PIK3CA | 732 | 218, 438 | 5.7 | 1.7% | 658, 876, 438 | 15.3 | 1.5% | 658, 1094, 438 | 17.4 | 4.0% | 11 |
| 157 | PIK3CA | 736 | 219, 439 | 5.9 | 0.9% | 659, 877, 439 | 7.8 | 1.1% | 659, 1095, 439 | 6.5 | 1.4% | 12 |
| 158 | PIK3CA | 923 | 220, 440 | 5.0 | 0.7% | 660, 878, 440 | 8.5 | 1.5% | 660, 1096, 440 | 7.4 | 0.6% | 12 |
| 159 | PIK3CA | 1087 | 221, 441 | 8.1 | 2.3% | 661, 879, 441 | 8.5 | 1.6% | 661, 1097, 441 | 17.5 | 4.9% | 12 |
| 160 | PIK3CA | 1094 | 222, 442 | 13.0 | 3.8% | 662, 880, 442 | 13.0 | 2.5% | 662, 1098, 442 | 30.1 | 6.4% | 11 |
| 161 | PKN3 | 2408 | 223, 443 | 9.4 | 2.1% | 663, 881, 443 | 15.2 | 3.7% | 663, 665, 443 | 32.1 | 6.6% | 12 |
| 162 | PKN3 | 2420 | 224, 444 | 14.5 | 1.7% | 664, 882, 444 | 30.4 | 7.5% | 664, 1099, 444 | 40.1 | 6.7% | 12 |
| 163 | PKN3 | 2421 | 225, 445 | 15.2 | 2.0% | 665, 883, 445 | 20.6 | 2.7% | 665, 1100, 445 | 50.8 | 7.8% | 12 |
| 164 | PKN3 | 2425 | 226, 446 | 28.4 | 3.8% | 666, 884, 446 | 27.0 | 6.9% | 666, 1101, 446 | 36.2 | 4.8% | 15 |
| 165 | PKN3 | 2682 | 227, 447 | 30.0 | 4.6% | 667, 885, 447 | 27.1 | 2.8% | 667, 1102, 447 | 37.1 | 6.2% | 11 |
| 166 | PKN3 | 2683 | 228, 448 | 22.4 | 2.8% | 668, 886, 448 | 34.8 | 2.2% | 668, 1103, 448 | 51.9 | 7.4% | 12 |
| 167 | PKN3 | 2931 | 229, 449 | 35.1 | 4.4% | 669, 887, 449 | 57.3 | 7.8% | 669, 1104, 449 | 88.6 | 7.1% | 13 |
| 168 | PKN3 | 3063 | 230, 450 | 21.8 | 3.1% | 670, 888, 450 | 28.6 | 8.5% | 670, 1105, 450 | 40.5 | 6.2% | 12 |
| 169 | PKN3 | 3314 | 231, 451 | 9.7 | 1.8% | 671, 889, 451 | 12.0 | 1.4% | 671, 1106, 451 | 17.3 | 1.3% | 10 |
| 170 | PKN3 | 3315 | 232, 452 | 10.1 | 1.3% | 672, 890, 452 | 15.3 | 2.8% | 672, 1107, 452 | 37.4 | 3.6% | 11 |
| 171 | RAF1 | 1509 | 233, 453 | 46.2 | 9.4% | 673, 891, 453 | 51.3 | 10.7% | 673, 1108, 453 | 61.3 | 4.4% | 12 |
| 172 | RAF1 | 1512 | 234, 454 | 40.1 | 9.7% | 674, 892, 454 | 34.5 | 5.6% | 674, 1109, 454 | 62.4 | 8.6% | 13 |
| 173 | RAF1 | 1628 | 235, 455 | 48.3 | 7.9% | 675, 893, 455 | 47.4 | 7.1% | 675, 1110, 455 | 41.1 | 5.1% | 12 |
| 174 | RAF1 | 1645 | 236, 456 | 38.9 | 2.3% | 676, 894, 456 | 62.1 | 9.0% | 676, 1111, 456 | 85.0 | 9.3% | 13 |
| 175 | RAF1 | 1780 | 237, 457 | 22.6 | 4.9% | 677, 895, 457 | 24.8 | 5.3% | 677, 1112, 457 | 37.6 | 10.4% | 12 |
| 176 | RAF1 | 1799 | 238, 458 | 23.2 | 3.1% | 678, 896, 458 | 43.6 | 7.6% | 678, 1113, 458 | 50.7 | 6.2% | 12 |
| 177 | RAF1 | 1807 | 239, 459 | 28.0 | 5.4% | 679, 897, 459 | 34.8 | 5.8% | 679, 1114, 459 | 37.0 | 5.3% | 15 |
| 178 | RAF1 | 1863 | 240, 460 | 28.2 | 3.1% | 680, 898, 460 | 38.1 | 4.5% | 680, 1115, 460 | 35.7 | 4.2% | 14 |
| 179 | RAF1 | 2157 | 241, 461 | 68.8 | 6.5% | 681, 899, 461 | 64.1 | 8.0% | 681, 1116, 461 | 86.7 | 12.6% | 14 |
| 180 | RAF1 | 2252 | 242, 462 | 11.4 | 1.7% | 682, 900, 462 | 25.8 | 5.4% | 682, 1117, 462 | 71.2 | 10.7% | 13 |
| 181 | SRD5A1 | 1150 | 243, 463 | 3.7 | 0.5% | 683, 901, 463 | 4.4 | 0.7% | 683, 1118, 463 | 3.8 | 0.4% | 12 |
| 182 | SRD5A1 | 1153 | 244, 464 | 3.2 | 0.4% | 684, 902, 464 | 5.2 | 0.5% | 684, 1119, 464 | 7.0 | 0.9% | 12 |
| 183 | SRD5A1 | 1845 | 245, 465 | 3.9 | 0.5% | 685, 903, 465 | 4.5 | 0.6% | 685, 1120, 465 | 7.4 | 0.8% | 13 |
| 184 | SRD5A1 | 1917 | 246, 466 | 9.4 | 0.8% | 686, 904, 466 | 10.2 | 1.3% | 686, 1121, 466 | 22.0 | 2.8% | 12 |
| 185 | SRD5A1 | 1920 | 247, 467 | 4.6 | 0.3% | 687, 905, 467 | 4.9 | 1.0% | 687, 1122, 467 | 6.4 | 0.5% | 11 |
| 186 | SRD5A1 | 1964 | 248, 468 | 6.2 | 0.7% | 688, 906, 468 | 10.4 | 0.7% | 688, 1123, 468 | 21.0 | 4.6% | 10 |
| 187 | SRD5A1 | 1981 | 249, 469 | 6.5 | 1.0% | 689, 907, 469 | 7.1 | 0.7% | 689, 1124, 469 | 8.8 | 1.5% | 12 |
| 188 | SRD5A1 | 2084 | 250, 470 | 16.9 | 1.1% | 690, 908, 470 | 15.7 | 1.5% | 690, 1125, 470 | 13.3 | 1.5% | 12 |
| 189 | SRD5A1 | 2085 | 251, 471 | 17.3 | 1.6% | 691, 909, 471 | 19.4 | 1.7% | 691, 1126, 471 | 20.8 | 2.6% | 12 |
| 190 | SRD5A1 | 2103 | 252, 472 | 7.5 | 1.3% | 692, 910, 472 | 10.9 | 1.2% | 692, 1127, 472 | 12.3 | 1.7% | 12 |
| 191 | TNF | 32 | 253, 473 | 71.4 | 13.2% | 693, 911, 473 | 93.7 | 14.9% | 693, 1128, 473 | 122.6 | 21.1% | 12 |
| 192 | TNF | 649 | 254, 474 | 100.0 | 16.3% | 694, 912, 474 | 127.7 | 12.6% | 694, 1129, 474 | 147.9 | 21.7% | 12 |
| 193 | TNF | 802 | 255, 475 | 67.2 | 10.7% | 695, 913, 475 | 64.0 | 6.6% | 695, 1130, 475 | 116.4 | 21.0% | 12 |
| 194 | TNF | 875 | 256, 476 | 101.7 | 19.9% | 696, 914, 476 | 99.3 | 15.5% | 696, 1131, 476 | 108.8 | 14.2% | 12 |
| 195 | TNF | 983 | 257, 477 | 94.5 | 7.0% | 697, 915, 477 | 83.1 | 7.3% | 697, 1132, 477 | 140.6 | 20.4% | 11 |
| 196 | TNF | 987 | 258, 478 | 82.0 | 10.9% | 698, 916, 478 | 139.4 | 8.2% | 698, 1133, 478 | 143.8 | 9.2% | 10 |
| 197 | TNF | 992 | 259, 479 | 126.7 | 15.8% | 699, 700, 479 | 121.7 | 10.8% | 699, 1134, 479 | 115.9 | 16.4% | 11 |
| 198 | TNF | 1003 | 260, 480 | 123.4 | 16.7% | 700, 917, 480 | 114.4 | 47.8% | 700, 1135, 480 | 98.5 | 17.2% | 14 |
| 199 | TNF | 1630 | 261, 481 | 58.0 | 5.7% | 701, 918, 481 | 56.1 | 9.4% | 701, 1136, 481 | 71.0 | 17.2% | 11 |
| 200 | TNF | 1631 | 262, 482 | 54.2 | 13.4% | 702, 919, 482 | 63.9 | 10.1% | 702, 1137, 482 | 73.8 | 14.8% | 11 |
| 201 | TNFSF13B | 188 | 263, 483 | 20.4 | 3.2% | 703, 920, 483 | 46.2 | 11.9% | 703, 1138, 483 | 58.4 | 12.7% | 13 |
| 202 | TNFSF13B | 313 | 264, 484 | 15.9 | 5.1% | 704, 921, 484 | 18.9 | 7.4% | 704, 1139, 484 | 48.0 | 8.1% | 12 |
| 203 | TNFSF13B | 337 | 265, 485 | 22.3 | 4.6% | 705, 922, 485 | 37.1 | 11.0% | 705, 1140, 485 | 63.6 | 10.4% | 12 |
| 204 | TNFSF13B | 590 | 266, 486 | 35.8 | 8.7% | 706, 923, 486 | 49.4 | 11.0% | 706, 1141, 486 | 50.7 | 10.3% | 10 |
| 205 | TNFSF13B | 652 | 267, 487 | 21.3 | 7.2% | 707, 924, 487 | 57.6 | 16.7% | 707, 1142, 487 | 78.8 | 5.6% | 14 |
| 206 | TNFSF13B | 661 | 268, 488 | 28.8 | 3.0% | 708, 925, 488 | 38.3 | 8.4% | 708, 1143, 488 | 56.5 | 16.3% | 12 |
| 207 | TNFSF13B | 684 | 269, 489 | 46.3 | 7.2% | 709, 926, 489 | 43.8 | 9.7% | 709, 1144, 489 | 54.5 | 4.6% | 12 |
| 208 | TNFSF13B | 905 | 270, 490 | 18.5 | 5.0% | 710, 927, 490 | 27.9 | 3.1% | 710, 1145, 490 | 51.7 | 10.9% | 12 |
| 209 | TNFSF13B | 961 | 271, 491 | 21.4 | 4.0% | 711, 928, 491 | 37.5 | 10.1% | 711, 1146, 491 | 77.6 | 11.2% | 14 |
| 210 | TNFSF13B | 1150 | 272, 492 | 24.1 | 7.0% | 712, 929, 492 | 23.4 | 5.7% | 712, 1147, 492 | 35.9 | 8.0% | 13 |
| 211 | VEGFA | 1426 | 273, 493 | 14.5 | 2.2% | 713, 930, 493 | 18.1 | 3.2% | 713, 1148, 493 | 21.0 | 3.8% | 13 |
| 212 | VEGFA | 1428 | 274, 494 | 18.5 | 2.6% | 714, 931, 494 | 32.1 | 5.8% | 714, 1149, 494 | 46.7 | 9.4% | 12 |
| 213 | VEGFA | 1603 | 275, 495 | 14.6 | 2.1% | 715, 932, 495 | 36.6 | 17.5% | 715, 1150, 495 | 65.6 | 6.9% | 13 |
| 214 | VEGFA | 1685 | 276, 496 | 17.1 | 1.3% | 716, 933, 496 | 20.2 | 5.5% | 716, 1151, 496 | 23.4 | 3.8% | 13 |
| 215 | VEGFA | 1792 | 277, 497 | 17.0 | 1.8% | 717, 934, 497 | 21.2 | 3.2% | 717, 1152, 497 | 39.5 | 6.3% | 12 |
| 216 | VEGFA | 2100 | 278, 498 | 116.9 | 11.5% | 718, 935, 498 | 103.6 | 7.5% | 718, 1153, 498 | 101.5 | 12.9% | 12 |
| 217 | VEGFA | 2102 | 279, 499 | 116.3 | 9.1% | 719, 936, 499 | 110.2 | 9.3% | 719, 1154, 499 | 105.0 | 8.0% | 12 |
| 218 | VEGFA | 2196 | 280, 500 | 24.2 | 2.7% | 720, 937, 500 | 26.6 | 3.1% | 720, 1155, 500 | 43.5 | 3.5% | 12 |
| 219 | VEGFA | 2261 | 281, 501 | 15.6 | 2.2% | 721, 938, 501 | 44.2 | 6.2% | 721, 1156, 501 | 109.0 | 9.8% | 12 |
| 220 | VEGFA | 2292 | 282, 502 | 48.4 | 4.3% | 722, 939, 502 | 45.1 | 7.2% | 722, 1157, 502 | 80.7 | 6.7% | 15 |

*All samples were normalized to the respective dsRNA QNeg (Qiagen) negative control samples run in the same experiment. That is, QNeg values were set as 100% active (i.e., no knockdown), with 95% confidence intervals (CI) ranging from 6.3-22.5%. As a positive control, an siRNA specific for rLuc was used, which samples showed on average expression levels that varied from 1.2% to 16.8% (i.e., about 83% to about 99% knockdown activity and a 95% CI ranging from 0.3% to 13.7%).
†“Pos” refers to the position on the target gene mRNA message that aligns with the 5′-end of the dsRNA sense strand. The mRNA numbering is based on the GenBank accession numbers as described herein.
‡The SEQ ID NOS. are provided in the following order: (1) Dicer: sense strand, antisense strand; (2) Nicked: 5′-sense strand fragment, 3′-sense strand fragment, and antisense strand; and (3) Gapped: 5′-sense strand fragment, 3′-sense strand fragment, and antisense strand. The Dicer dsRNA has two strands, while ndsRNA and gdsRNA have three strands each. The nicked or gapped sense strand fragments have three locked nucleic acids each.
\hat{ }“Length 5′-S” refers to the length of the 5′-sense strand fragment of the nicked or gapped mdRNA, which indicates the position of the nick (e.g., 10 means the nick is between position 10 and 11, so the 5′sense strand fragment is 10 nucleotides long and the 3′-sense strand fragment is 15 nucelotides long) or one nucleotide gap (e.g., 10 means the missing nucleotide is number 11, so the 5′sense strand fragment is 10 nucleotides long and the 3′-sense strand fragment is 14 nucelotides long).

### Example 2

### Knockdown of β-Galactosidase Activity By Gapped dsRNA Dicer Substrate

[0186] The activity of a Dicer substrate dsRNA containing a gap in the double-stranded structure in silencing LacZ mRNA as compared to the normal Dicer substrate dsRNA (i.e., not having a gap) was examined.

Nucleotide Sequences of dsRNA and mdRNA Targeting LacZ mRNA

[0187] The nucleic acid sequence of the one or more sense strands, and the antisense strand of the dsRNA and gapped dsRNA (also referred to herein as a meroduplex or mdRNA) are shown below and were synthesized using standard techniques. The RISC activator LacZ dsRNA comprises a 21 nucleotide sense strand and a 21 nucleotide antisense strand, which can anneal to form a double-stranded region of 19 base pairs with a two deoxythymidine overhang on each strand (referred to as 21/21 dsRNA).

LacZ dsRNA (21/21)-RISC Activator

| | |
|---|---|
| Sense | |
| 5′-CUACACAAAUCAGCGAUUUdTdT-3′ | (SEQ ID NO:1) |
| Antisense | |
| 3′-dTdTGAUGUGUUUAGUCGCUAAA-5′ | (SEQ ID NO:2) |

[0188] The Dicer substrate LacZ dsRNA comprises a 25 nucleotide sense strand and a 27 nucleotide antisense strand, which can anneal to form a double-stranded region of 25 base pairs with one blunt end and a cytidine and uridine overhang on the other end (referred to as 25/27 dsRNA).

| | |
|---|---|
| LacZ dsRNA (25/27)-Dicer Substrate | |
| Sense | |
| 5′-CUACACAAAUCAGCGAUUUCCAUdGdT-3′ | (SEQ ID NO:3) |
| Antisense | |
| 3′-CUGAUGUGUUUAGUCGCUAAAGGUA C A-5′ | (SEQ ID NO:4) |

The LacZ mdRNA comprises two sense strands of 13 nucleotides (5′-portion) and 11 nucleotides (3′-portion) and a 27 nucleotide antisense strand, which three strands can anneal to form two double-stranded regions of 13 and 11 base pairs separated by a single nucleotide gap (referred to as a 13, 11/27 mdRNA). The 5′-end of the 11 nucleotide sense strand fragment may be optionally phosphorylated. The “*” indicates a gap—in this case, a single nucleotide gap (i.e., a cytidine is missing).

LacZ mdRNA (13, 11/27)-Dicer Substrate
Sense

(SEQ ID NOS:5, 6)

5′-CUACACAAAUCAG*GAUUUCCAUdGdT-3′
Antisense

(SEQ ID NO:4)

3′-CUGAUGUGUUUAGUCGCUAAAGGUA C A-5′

Each of the LacZ dsRNA or mdRNA was used to transfect 9lacZ/R cells.

### Transfection

[0189] Six well collagen-coated plates were seeded with 5×10⁵9lacZ/R cells/well in a 2 ml volume per well, and incubated overnight at 37° C./5% CO₂ in DMEM/high glucose media. Preparation for transfection: 250 μl of OPTIMEM media without serum was mixed with 5 μl of 20 pmol/μl dsRNA and 5 μl of HIPERFECT transfection solution (Qiagen) was mixed with another 250 μl OPTIMEM media. After both mixtures were allowed to equilibrate for 5 minutes, the RNA and transfection solutions were combined and left at room temperature for 20 minutes to form transfection complexes. The final concentration of HIPERFECT was 50 μM, and the dsRNAs were tested at 0.05 nM, 0.1 nM, 0.2 nM, 0.5 nM, 1 nM, 2 nM, 5 nM, and 10 nM, while the mdRNA was tested at 0.2 nM, 0.5 nM, 1 nM, 2 nM, 5 nM, 10 nM, 20 nM, and 50 nM. Complete media was removed, the cells were washed with incomplete OPTIMEM, and then 500 μl transfection mixture was applied to the cells, which were incubated with gentle shaking at 37° C. for 4 hours. After transfecting, the transfection media was removed, cells were washed once with complete DMEM/high glucose media, fresh media added, and the cells were then incubated for 48 hours at 37° C., 5% CO₂.

### β-Galactosidase Assay

[0190] Transfected cells were washed with PBS, and then detached with 0.5 ml trypsin/EDTA. The detached cells were suspended in 1 ml complete DMEM/high glucose and transferred to a clean tube. The cells were harvested by centrifugation at 250×g for 5 minutes, and then resuspended in 50 μl× lysis buffer at 4° C. The lysed cells were subjected to two freeze-thaw cycles on dry ice and a 37° C. water bath. The lysed samples were centrifuged for 5 minutes at 4° C. and the supernatant was recovered. For each sample, 1.5 μl and 10 μl of lysate was transferred to a clean tube and sterile water added to a final volume of 30 μl followed by the addition of 70 μl o-nitrophenyl-β-D-galactopyranose (ONPG) and 200 μl× cleavage buffer with β-mercaptoethanol. The samples were mixed briefly, incubated for 30 minutes at 37° C., and then 500 μl stop buffer was added (final volume 800 μl). β-Galactosidase activity for each sample was measured in disposable cuvettes at 420 nm. Protein concentration was determined by the BCA (bicinchoninic acid) method. For the purpose of the instant example, the level of measured LacZ activity was correlated with the quantity of LacZ transcript within 9L/LacZ cells. Thus, a reduction in β-galactosidase activity after dsRNA transfection, absent a negative impact on cell viability, was attributed to a reduction in the quantity of LacZ transcripts resulting from targeted degradation mediated by the LacZ dsRNA.

### Results

[0191] Knockdown activity in transfected and untransfected cells was normalized to a Qneg control dsRNA and presented as a normalized value of the Qneg control (i.e., Qneg represented 100% or “normal” gene expression levels). Both the lacZ RISC activator and Dicer substrate dsRNAs molecule showed good knockdown of β-galactosidase activity at concentration as low as 0.1 nM (FIG. 2), while the Dicer substrate antisense strand alone (single stranded 27mer) had no silencing effect. Surprisingly, a gapped mdRNA showed good knockdown although somewhat lower than that of intact RISC activator and Dicer substrate dsRNAs (FIG. 2). The presence of the gapmer cytidine (i.e., the missing nucleotide) at various concentrations (0.1 μM to 50 μM) had no effect on the activity of the mdRNA (data not shown). None of the dsRNA or mdRNA solutions showed any detectable toxicity in the transfected 9L/LacZ cells. The IC₅₀ of the lacZ mdRNA was calculated to be 3.74 nM, which is about 10 fold lower than what had been previously measured for lacZ dsRNA 21/21 (data not shown). These results show that a meroduplex (gapped dsRNA) is capable of inducing gene silencing.

### Example 3

### Knockdown of Influenza Gene Expression by Nicked dsRNA

[0192] The activity of a nicked dsRNA (21/21) in silencing influenza gene expression as compared to a normal dsRNA (i.e., not having a nick) was examined.

Nucleotide Sequences of dsRNA and mdRNA Targeting Influenza mRNA

[0193] The dsRNA and nicked dsRNA (another form of meroduplex, referred to herein as ndsRNA) are shown below and were synthesized using standard techniques. The RISC activator influenza G1498 dsRNA comprises a 21 nucleotide sense strand and a 21 nucleotide antisense strand, which can anneal to form a double-stranded region of 19 base pairs with a two deoxythymidine overhang on each strand.

| | |
|---|---|
| G1498-wt dsRNA (21/21) | |
| Sense | |
| 5′-GGAUCUUAUUUCUUCGGAGdTdT-3′ | (SEQ ID NO:7) |
| Antisense | |
| 3′-dTdTCCUAGAAUAAAGAAGCCUC-5′ | (SEQ ID NO:8) |

[0194] The RISC activator influenza G1498 dsRNA was nicked on the sense strand after nucleotide 11 to produce a ndsRNA having two sense strands of 11 nucleotides (5′-portion, italic) and 10 nucleotides (3′-portion) and a 21 nucleotide antisense strand, which three strands can anneal to form two double-stranded regions of 11 (shown in italics) and 10 base pairs separated by a one nucleotide gap (which may be referred to as G1498 11, 10/21 ndsRNA-wt). The 5′-end of the 10 nucleotide sense strand fragment may be optionally phosphorylated, as depicted by a “p” preceding the nucleotide (e.g., pC).

| | |
|---|---|
| G1498 ndsRNA-wt (11, 10/21) | |
| Sense | |
| 5′-GGAUCUUAUUUCUUCGGAGdTdT-3′ | (SEQ ID NO:9, 10) |
| Antisense | |
| 3′-dTdTCCUAGAAUAAAGAAGCCUC-5′ | (SEQ ID NO:8) |
| G1498 ndsRNA-wt (11, 10/21) | |
| Sense | |
| 5′-GGAUCUUAUUUpCUUCGGAGdTdT-3′ | (SEQ ID NOS:9, 10) |
| Antisense | |
| 3′-dTdTCCUAGAAUAAAGAAGCCUC-5′ | (SEQ ID NO: 8) |

In addition, each of these G1498 dsRNAs were made with each U substituted with a 5-methyluridine (ribothymidine) and are referred to as G1498 dsRNA-rT. Each of the G1498 dsRNA or ndsRNA (meroduplex), with or without the 5-methyluridine substitution, was used to transfect HeLa S3 cells having an influenza target sequence associated with a luciferase gene. Also, the G1498 antisense strand alone or the antisense strand annealed to the 11 nucleotide sense strand portion alone or the 10 nucleotide sense strand portion alone were examined for activity.

### Transfection and Dual Luciferase Assay

[0195] The reporter plasmid psiCHECK™-2 (Promega, Madison, Wis.), which constitutively expresses both firefly luc2 (Photinus pyralis) and Renilla (Renilla reniformis, also known as sea pansy) luciferases, was used to clone in a portion of the influenza NP gene downstream of the Renilla translational stop codon that results in a Renilla-influenza NP fusion mRNA. The firefly luciferase in the psiCHECK™-2 vector is used to normalize Renilla luciferase expression and serves as a control for transfection efficiency.

[0196] Multi-well plates were seeded with HeLa S3 cells/well in 100 μl Ham's F12 medium and 10% fetal bovine serum, and incubated overnight at 37° C./5% CO₂. The HeLa S3 cells were transfected with the psiCHECK™-influenza plasmid (75 ng) and G1498 dsRNA or ndsRNA (final concentration of 10 nM or 100 nM) formulated in Lipofectamine™ 2000 and OPTIMEM reduced serum medium. The transfection mixture was incubated with the HeLa S3 cells with gentle shaking at 37° C. for about 18 to 20 hours.

[0197] After transfecting, firefly luciferase reporter activity was measured first by adding Dual-Glo™ Luciferase Reagent (Promega, Madison, Wis.) for 10 minutes with shaking, and then quantitating the luminescent signal using a VICTOR³™1420 Multilabel Counter (PerkinElmer, Waltham, Mass.). After measuring the firefly luminescence, Stop & Glo® Reagent (Promega, Madison, Wis.) was added for 10 minutes with shaking to simultaneously quench the firefly reaction and initiate the Renilla luciferase reaction, and then the Renilla luciferase luminescent signal was quantitated VICTOR³™ 1420 Multilabel Counter (PerkinElmer, Waltham, Mass.).

### Results

[0198] Knockdown activity in transfected and untransfected cells was normalized to a Qneg control dsRNA and presented as a normalized value of the Qneg control (i.e., Qneg represented 100% or “normal” gene expression levels). Thus, a smaller value indicates a greater knockdown effect. The G1498 dsRNA-wt and dsRNA-rT showed similar good knockdown at a 100 nM concentration (FIG. 3). Surprisingly, the G1498 ndsRNA-rT, whether phosphorylated or not, showed good knockdown although somewhat lower than the G1498 dsRNA-wt (FIG. 3). Similar results were obtained with dsRNA or ndsRNA at 10 nM (data not shown). None of the G1498 dsRNA or ndsRNA solutions showed any detectable toxicity in HeLa S3 cells at either 10 nM or 100 nM. Even the presence of only half a nicked sense strand (an 11 nucleotide or 10 nucleotide strand alone) with a G1498 antisense strand showed some detectable activity. These results show that a nicked-type meroduplex dsRNA molecule is unexpectedly capable of promoting gene silencing.

### Example 4

### Knockdown Activity of Nicked mdRNA

[0199] In this example, the activity of a dicer substrate LacZ dsRNA of Example 1 having a sense strand with a nick at various positions was examined. In addition, a dideoxy nucleotide (i.e., ddG) was incorporated at the 5′-end of the 3′-most strand of a sense sequence having a nick or a single nucleotide gap to determine whether the in vivo ligation of the nicked sense strand is “rescuing” activity. The ddG is not a substrate for ligation. Also examined was the influenza dicer substrate dsRNA of Example 7 having a sense strand with a nick at one of positions 8 to 14. The “p” designation indicates that the 5′-end of the 3′-most strand of the nicked sense influenza sequence was phosphorylated. The “L” designation indicates that the G at position 2 of the 5′-most strand of the nicked sense influenza sequence was substituted for a locked nucleic acid G. The Qneg is a negative control dsRNA.

[0200] The dual fluorescence assay of Example 3 was used to measure knockdown activity with 5 nM of the LacZ sequences and 0.5 nM of the influenza sequences. The lacZ dicer substrate (25/27, LacZ-DS) and lacZ RISC activator (21/21, LacZ) are equally active, and the LacZ-DS can be nicked in any position between 8 and 14 without affecting activity (FIG. 3). In addition, the inclusion of a ddG on the 5′-end of the 3′-most LacZ sense sequence having a nick (LacZ:DSNkd13-3′dd) or a one nucleotide gap (LacZ:DSNkd13D1-3′dd) was essentially as active as the unsubstituted sequence (FIG. 4). The influenza dicer substrate (G1498DS) nicked at any one of positions 8 to 14 was also highly active (FIG. 5). Phosphorylation of the 5′-end of the 3′-most strand of the nicked sense influenza sequence had essentially no effect on activity, but addition of a locked nucleic acid appears to improve activity.

### Example 5

### Mean Inhibitory Concentration of mdRNA

[0201] In this example, a dose response assay was performed to measure the mean inhibitory concentration (IC₅₀) of the influenza dicer substrate dsRNA of Example 8 having a sense strand with a nick at position 12, 13, or 14, including or not a locked nucleic acid. The dual luciferase assay of Example 2 was used. The influenza dicer substrate dsRNA (G1498DS) was tested at 0.0004 nM, 0.002 nM, 0.005 nM, 0.019 nM, 0.067 nM, 0.233 nM, 0.816 nM, 2.8 nM, and 10 nM, while the mdRNA with a nick at position 13 (G1498DS:Nkd13) was tested at 0.001 nM, 0.048 nM, 0.167 nM, 1 nM, 2 nM, 7 nM, and 25 nM (see FIG. 6). Also tested were RISC activator molecules (21/21) with or without a nick at various positions (including G1498DS:Nkd11, G1498DS:Nkd12, and G1498DS:Nkd14), each of the nicked versions with a locked nucleic acid as described above (data not shown). The Qneg is a negative control dsRNA.

[0202] The IC₅₀ of the RISC activator G1498 was calculated to be about 22 pM, while the dicer substrate G1498DS IC₅₀ was calculated to be about 6 pM. The IC₅₀ of RISC and Dicer mdRNAs range from about 200 pM to about 15 nM. The inclusion of a single locked nucleic acid reduced the IC₅₀ of Dicer mdRNAs by up 4 fold (data not shown). These results show that a meroduplex dsRNA having a nick or gap in any position is capable of inducing gene silencing.

### Example 6

### Knockdown Activity of Gapped mdRNA

[0203] The activity of an influenza dicer substrate dsRNA having a sense strand with a gap of differing sizes and positions was examined. The influenza dicer substrate dsRNA of Example 8 was generated with a sense strand having a gap of 0 to 6 nucleotides at position 8, a gap of 4 nucleotides at position 9, a gap of 3 nucleotides at position 10, a gap of 2 nucleotides at position 11, and a gap of 1 nucleotide at position 12 (see Table 2). The Qneg is a negative control dsRNA. Each of the mdRNAs was tested at a concentration of 5 nM (data not shown) and 10 nM. The mdRNAs have the following antisense strand 5′-CAUUGUCUCCGAAGAAAUAAGAUCCUU (SEQ ID NO:11), and nicked or gapped sense strands as shown in Table 2.

TABLE 2

| | | | | | |
|---|---|---|---|---|---|
| | 5′ Sense* | | Gap | Gap | % |
| mdRNA | (SEQ ID NO.) | 3′ Sense (SEQ ID NO.) | Pos | Size | KD^{†} |

| | | | | | |
|---|---|---|---|---|---|
| G1498:DSNkd8 | GGAUCUUA (12) | UUUCUUCGGAGACAAdTdG (13) | 8 | 0 | 67.8 |
| G1498:DSNkd8D1 | GGAUCUUA (12) | UUCUUCGGAGACAAdTdG (14) | 8 | 1 | 60.9 |
| G1498:DSNkd8D2 | GGAUCUUA (12) | UCUUCGGAGACAAdTdG (15) | 8 | 2 | 48.2 |
| G1498:DSNkd8D3 | GGAUCUUA (12) | CUUCGGAGACAAdTdG (16) | 8 | 3 | 44.1 |
| G1498:DSNkd8D4 | GGAUCUUA (12) | UUCGGAGACAAdTdG (17) | 8 | 4 | 30.8 |
| G1498:DSNkd8D5 | GGAUCUUA (12) | UCGGAGACAAdTdG (18) | 8 | 5 | 10.8 |
| G1498:DSNkd8D6 | GGAUCUUA (12) | CGGAGACAAdTdG (19) | 8 | 6 | 17.9 |
| G1498:DSNkd9D4 | GGAUCUUAU (20) | UCGGAGACAAdTdG (18) | 9 | 4 | 38.9 |
| G1498:DSNkd10D3 | GGAUCUUAUU (21) | UCGGAGACAAdTdG (18) | 10 | 3 | 38.4 |
| G1498:DSNkd11D2 | GGAUCUUAUUU (22) | UCGGAGACAAdTdG (18) | 11 | 2 | 46.2 |
| G1498:DSNkd12D1 | GGAUCUUAUUUC (23) | UCGGAGACAAdTdG (18) | 12 | 1 | 49.6 |
| Plasmid | — | — | — | — | 5.3 |

*G indicates a locked nucleic acid G in the 5′ sense strand.
^{†}% KD means percent knockdown activity.

[0204] The dual fluorescence assay of Example 2 was used to measure knockdown activity. Similar results were obtained at both the 5 nM and 10 nM concentrations. These data show that an mdRNA having a gap of up to 6 nucleotides still has activity, although having four or fewer missing nucleotides shows the best activity (see, also, FIG. 7). Thus, mdRNA having various sizes gaps that are in various different positions have knockdown activity.

[0205] To examine the general applicability of a sequence having a sense strand with a gap of differing sizes and positions, a different dsRNA sequence was tested. The lacZ RISC dsRNA of Example 1 was generated with a sense strand having a gap of 0 to 6 nucleotides at position 8, a gap of 5 nucleotides at position 9, a gap of 4 nucleotides at position 10, a gap of 3 nucleotides at position 11, a gap of 2 nucleotides at position 12, a gap of 1 nucleotide at position 12, and a nick (gap of 0) at position 14 (see Table 3). The Qneg is a negative control dsRNA. Each of the mdRNAs was tested at a concentration of 5 nM (data not shown) and 25 nM. The lacZ mdRNAs have the following antisense strand 5′-AAAUCGCUGAUUUGUGUAGdTdTUAAA (SEQ ID NO:2) and nicked or gapped sense strands as shown in Table 3.

TABLE 3

| | | | | |
|---|---|---|---|---|
| | 5′ Sense* | 3′ Sense* | Gap | Gap |
| mdRNA | (SEQ ID NO.) | (SEQ ID NO.) | Pos | Size |

| | | | | |
|---|---|---|---|---|
| LacZ:Nkd8 | CUACACAA (24) | AUCAGCGAUUUdTdT (25) | 8 | 0 |
| LacZ:Nkd8D1 | CUACACAA (24) | UCAGCGAUUUdTdT (26) | 8 | 1 |
| LacZ:Nkd8D2 | CUACACAA (24) | CAGCGAUUUdTdT (27) | 8 | 2 |
| LacZ:Nkd8D3 | CUACACAA (24) | AGCGAUUUdTdT (28) | 8 | 3 |
| LacZ:Nkd8D4 | CUACACAA (24) | GCGAUUUdTdT (29) | 8 | 4 |
| LacZ:Nkd8D5 | CUACACAA (24) | CGAUUUdTdT (30) | 8 | 5 |
| LacZ:Nkd8D6 | CUACACAA (24) | GAUUUdTdT (31) | 8 | 6 |
| LacZ:Nkd9D5 | CUACACAAA (32) | GAUUUdTdT (31) | 9 | 5 |
| LacZ:Nkd10D4 | CUACACAAAU (33) | GAUUUdTdT (31) | 10 | 4 |
| LacZ:Nkd11D3 | CUACACAAAUC (34) | GAUUUdTdT (31) | 11 | 3 |
| LacZ:Nkd12D2 | CUACACAAAUCA (35) | GAUUUdTdT (31) | 12 | 2 |
| LacZ:Nkd13D1 | CUACACAAAUCAG (36) | GAUUUdTdT (31) | 13 | 1 |
| LacZ:Nkd14 | CUACACAAAUCAGC (37) | GAUUUdTdT (31) | 14 | 0 |

*A indicates a locked nucleic acid A in each sense strand.

[0206] The dual fluorescence assay of Example 3 was used to measure knockdown activity. FIG. 8 shows that an mdRNA having a gap of up to 6 nucleotides has substantial activity and the position of the gap may affect the potency of knockdown. Thus, mdRNA having various sizes gaps that are in various different positions and in different mdRNA sequences have knockdown activity.

### Example 7

### Knockdown Activity of Substituted mdRNA

[0207] The activity of an influenza dsRNA RISC sequences having a nicked sense strand and the sense strands having locked nucleic acid substitutions were examined. The influenza RISC sequence G1498 of Example 3 was generated with a sense strand having a nick at positions 8 to 14 counting from the 5′-end. Each sense strand was substituted with one or two locked nucleic acids as shown in Table 4. The Qneg and Plasmid are negative controls. Each of the mdRNAs was tested at a concentration of 5 nM. The antisense strand used was 5′-CUCCGAAGAAAUAAGAUCCdTdT (SEQ ID NO:8).

TABLE 4

| | | | | |
|---|---|---|---|---|
| | 5′ Sense* | 3′ Sense* | Nick | % |
| mdRNA | (SEQ ID NO.) | (SEQ ID NO.) | Pos | KD |

| | | | | |
|---|---|---|---|---|
| G1498-wt | GGAUCUUAUUUCUUCGGAGdTdT (7) | — | — | 85.8 |
| G1498-L | GGAUCUUAUUUCUUCGGAGdTdT (61) | — | — | 86.8 |
| G1498:Nkd8-1 | GGAUCUUA (12) | UUUCUUCGGAGdTdT (47) | 8 | 36.0 |
| G1498:Nkd8-2 | GGAUCUUA (40) | UUUCUUCGGAGdTdT (54) | 8 | 66.2 |
| G1498:Nkd9-1 | GGAUCUUAU (20) | UUCUUCGGAGdTdT (48) | 9 | 60.9 |
| G1498:Nkd9-2 | GGAUCUUAU (41) | UUCUUCGGAGdTdT (55) | 9 | 64.4 |
| G1498:Nkd10-1 | GGAUCUUAUU (21) | UCUUCGGAGdTdT (49) | 10 | 58.2 |
| G1498:Nkd10-2 | GGAUCUUAUU (42) | UCUUCGGAGdTdT (56) | 10 | 68.5 |
| G1498:Nkd11-1 | GGAUCUUAUUU (22) | CUUCGGAGdTdT (50) | 11 | 75.9 |
| G1498:Nkd11-2 | GGAUCUUAUUU (43) | CUUCGGAGdTdT (57) | 11 | 67.1 |
| G1498:Nkd12-1 | GGAUCUUAUUUC (23) | UUCGGAGdTdT (51) | 12 | 59.9 |
| G1498:Nkd12-2 | GGAUCUUAUUUC (44) | UUCGGAGdTdT (58) | 12 | 72.8 |
| G1498:Nkd13-1 | GGAUCUUAUUUCU (38) | UCGGAGdTdT (52) | 13 | 37.1 |
| G1498:Nkd13-2 | GGAUCUUAUUUCU (45) | UCGGAGdTdT (59) | 13 | 74.3 |
| G1498:Nkd14-1 | GGAUCUUAUUUCUU (39) | CGGAGdTdT (53) | 14 | 29.0 |
| G1498:Nkd14-2 | GGAUCUUAUUUCUU (46) | CGGAGdTdT (60) | 14 | 60.2 |
| Qneg | — | — | — | 0 |
| Plasmid | — | — | — | 3.6 |

*Nucleotides that are bold and underlined are locked nucleic acids.

[0208] The dual fluorescence assay of Example 3 was used to measure knockdown activity. These data show that increasing the number of locked nucleic acid substitutions tends to 5 increase activity of an mdRNA having a nick at any of a number of positions. The single locked nucleic acid per sense strand appears to be most active when the nick is at position 11 (see FIG. 9). But, multiple locked nucleic acids on each sense strand make mdRNA having a nick at any position as active as the most optimal nick position with a single substitution (i.e., position 11) (FIG. 9). Thus, mdRNA having duplex stabilizing modifications make mdRNA essentially equally active regardless of the nick position.

[0209] Similar results were observed when locked nucleic acid substitutions were made in the LacZ dicer substrate mdRNA of Example 2 (SEQ ID NOS:3 and 4). The lacZ dicer was nicked at positions 8 to 14, and a duplicate set of nicked LacZ dicer molecules were made with the exception that the A at position 3 (from the 5′-end) of the 5′ sense strand was substituted for a locked nucleic acid A (LNA-A). As is evident from FIG. 10, most of the nicked lacZ dicer molecules containing LNA-A were as potent in knockdown activity as the unsubstituted lacZ dicer.

### Example 7

### mdRNA Knockdown of Influenza Virus Titer

[0210] The activity of a dicer substrate nicked dsRNA in reducing influenza virus titer as compared to a wild-type dsRNA (i.e., not having a nick) was examined. The influenza dicer substrate sequence (25/27) is as follows:

| | |
|---|---|
| Sense | |
| 5′-GGAUCUUAUUUCUUCGGAGACAAdTdG | (SEQ ID NO:62) |
| Antisense | |
| 5′-CAUUGUCUCCGAAGAAAUAAGAUCCUU | (SEQ ID NO:11) |

[0211] The mdRNA sequences have a nicked sense strand after position 12, 13, and 14, respectively, as counted from the 5′-end, and the G at position 2 is substituted with locked nucleic acid G. For the viral infectivity assay, Vero cells were seeded at 6.5×10⁴ cells/well the day before transfection in 500 μl 10% FBS/DMEM media per well. Samples of 100, 10, 1, 0.1, and 0.01 nM stock of each dsRNA were complexed with 1.0 μl (1 mg/ml stock) of Lipofectamine™ 2000 (Invitrogen, Carlsbad, Calif.) and incubated for 20 minutes at room temperature in 150 μl OPTIMEM (total volume) (Gibco, Carlsbad, Calif.). Vero cells were washed with OPTIMEM, and 150 μl of the transfection complex in OPTIMEM was then added to each well containing 150 μl of OPTIMEM media. Triplicate wells were tested for each condition. An additional control well with no transfection condition was prepared. Three hours post transfection, the media was removed. Each well was washed once with 200 μl PBS containing 0.3% BSA and 10 mM HEPES/PS. Cells in each well were infected with WSN strain of influenza virus at an MOI 0.01 in 200 μl of infection media containing 0.3% BSA/10 mM HEPES/PS and 4 μg/ml trypsin. The plate was incubated for 1 hour at 37° C. Unadsorbed virus was washed off with the 200 μl of infection media and discarded, then 400 μl DMEM containing 0.3% BSA/10 mM HEPES/PS and 4 μg/ml trypsin was added to each well. The plate was incubated at 37° C., 5% CO₂ for 48 hours, then 50 μl supernatant from each well was tested in duplicate by TCID₅₀ assays (50% Tissue-Culture Infective Dose, WHO protocol) in MDCK cells and titers were estimated using the Spearman and Karber formula. The results show that these mdRNAs show about a 50% to 60% viral titer knockdown, even at a concentration as low as 10 pM (FIG. 11).

[0212] An in vivo influenza mouse model was also used to examine the activity of a dicer substrate nicked dsRNA in reducing influenza virus titer as compared to a wild-type dsRNA (i.e., not having a nick). Female BALB/c mice (age 8-10 weeks with 5-10 mice per group) were dosed intranasally with 120 nmol/kg/day dsRNA (formulated in C12-norArg(NH₃+Cl⁻)—C12/DSPE-PEG2000/DSPC/cholesterol at a ratio of 30:1:20:49) for three consecutive days before intranasal challenge with influenza strain PR8 (20 PFU/mouse). Two days after infection, whole lungs are harvested from each mouse and placed in a solution of PBS/0.3% BSA with antibiotics, homogenize, and measure the viral titer (TCID₅₀). Doses were well tolerated by the mice, indicated by less than 2% body weight reduction in any of the dose groups. The mdRNAs tested exhibit similar, if not slightly greater, virus reduction in vivo as compared to unmodified and unnicked G1498 dicer substrate (see FIG. 12). Hence, mdRNA are active in vivo.

### Example 8

### Effect of mdRNA on Cytokine Induction

[0213] The effect of the mdRNA structure on cytokine induction in vivo was examined. Female BALB/c mice (age 7-9 weeks) were dosed intranasally with about 50 μM dsRNA (formulated in C12-norArg(NH₃+Cl⁻)—C12/DSPE-PEG2000/DSPC/cholesterol at a ratio of 30:1:20:49) or with 605 nmol/kg/day naked dsRNA for three consecutive days. About four hours after the final dose is administered, the mice were sacrificed to collect bronchoalveolar fluid (BALF), and collected blood is processed to serum for evaluation of the cytokine response. Bronchial lavage was performed with 0.5 mL ice-cold 0.3% BSA in saline two times for a total of 1 mL. BALF was spun and supernatants collected and frozen until cytokine analysis. Blood was collected from the vena cava immediately following euthanasia, placed into serum separator tubes, and allowed to clot at room temperature for at least 20 minutes. The samples were processed to serum, aliquoted into Millipore ULTRAFREE 0.22 μm filter tubes, spun at 12,000 rpm, frozen on dry ice, and then stored at −70° C. until analysis. Cytokine analysis of BALF and plasma were performed using the Procarta mouse 10-Plex Cytokine Assay Kit (Panomics, Fremont, Calif.) on a Bio-Plex array reader. Toxicity parameters were also measured, including body weights, prior to the first dose on day 0 and again on day 3 (just prior to euthanasia). Spleens were harvested and weighed (normalized to final body weight). The results are provided in Table 5.

TABLE 5
In vivo Cytokine Induction by Naked mdRNA

| | | | G1498:Nkd | | G1498:DSNkd | G1498:DSNkd | G1498:DSNkd |
|---|---|---|---|---|---|---|---|
| Cytokine | | G1498 | 11-1 | G1498:DS | 12-1 | 13-1 | 14-1 |
| IL-6 | Conc (pg/mL) | 90.68 | 10.07 | 77.35 | 17.17 | 18.21 | 38.59 |
| | Fold decrease | — | 9 | — | 5 | 4 | 2 |
| IL-12 | Conc (pg/mL) | 661.48 | 20.32 | 1403.61 | 25.07 | 37.70 | 57.02 |
| (p40) | Fold decrease | — | 33 | — | 56 | 37 | 25 |
| TNFα | Conc (pg/mL) | 264.49 | 25.59 | 112.95 | 20.52 | 29.00 | 64.93 |
| | Fold decrease | — | 10 | — | 6 | 4 | 2 |

[0214] The mdRNA (RISC or dicer sized) induced cytokines to lesser extent than the intact (i.e., not nicked) parent molecules. The decrease in cytokine induction was greatest when looking at IL-12(p40), the cytokine with consistently the highest levels of induction of the 10 cytokine multiplex assay. For the mdRNA, the decrease in IL-12 (p40) ranges from 25- to 56-fold, while the reduction in either IL-6 or TNFα induction was more modest (the decrease in these two cytokines ranges from 2- to 10-fold). Thus, the mdRNA structure appears to provide an advantage in vivo in that cytokine induction is minimized compared to unmodified dsRNA.

[0215] Similar results were obtained with the formulated mdRNA, although the reduction in induction was not as prominent. In addition, the presence or absence of a locked nucleic acid has no effect on cytokine induction. These results are shown in Table 6.

TABLE 6
In vivo Cytokine Induction by Formulated mdRNA

| | | | G1498:Nkd | G1498:Nkd | G1498:DSNkd | G1498:DSNkd |
|---|---|---|---|---|---|---|
| Cytokine | | G1498:DS | 12-1 | 13-1 | 14-1 | 13 |
| IL-6 | Conc (pg/mL) | 29.04 | 52.95 | 10.28 | 7.79 | 44.29 |
| | Fold decrease | — | −1.8 | 3 | 4 | −1.5 |
| IL-12 | Conc (pg/mL) | 298.93 | 604.24 | 136.45 | 126.71 | 551.49 |
| (p40) | Fold decrease | — | 0 | 2 | 2 | 1 |
| TNFα | Conc (pg/mL) | 13.49 | 21.35 | 3.15 | 3.15 | 18.69 |
| | Fold decrease | — | −1.6 | 4 | 4 | 1.4 |

[0216] The teachings of all of references cited herein including patents, patent applications, journal articles, webpages, tables, and priority documents are incorporated herein in their entirety by reference. Although the foregoing disclosure has been described in detail by way of example for purposes of clarity of understanding, it will be apparent to the artisan that certain changes and modifications may be practiced within the scope of the appended claims which are presented by way of illustration not limitation. In this context, various publications and other references have been cited within the foregoing disclosure for economy of description. It is noted, however, that the various publications discussed herein are incorporated solely for their disclosure prior to the filing date of the present application, and the inventors reserve the right to antedate such disclosure by virtue of prior invention.

The application's sequence listing, which the Patent Office published only in electronic form, follows.

SEQUENCE LISTING (2532 sequences)

SEQ ID NO: 1 - DNA, 21 bp, Artificial Sequence
  Description of Combined DNA/RNA Molecule: Synthetic oligonucleotide
  Description of Artificial Sequence: Synthetic oligonucleotide
cuacacaaaucagcgauuutt

SEQ ID NO: 2 - DNA, 21 bp, Artificial Sequence
  Description of Combined DNA/RNA Molecule: Synthetic oligonucleotide
  Description of Artificial Sequence: Synthetic oligonucleotide
aaaucgcugauuuguguagtt

SEQ ID NO: 3 - DNA, 25 bp, Artificial Sequence
  Description of Combined DNA/RNA Molecule: Synthetic oligonucleotide
  Description of Artificial Sequence: Synthetic oligonucleotide
cuacacaaaucagcgauuuccaugt

SEQ ID NO: 4 - RNA, 27 nt, Artificial Sequence
  Description of Artificial Sequence: Synthetic oligonucleotide
acauggaaaucgcugauuuguguaguc

SEQ ID NO: 5 - RNA, 13 nt, Artificial Sequence
  Description of Artificial Sequence: Synthetic oligonucleotide
cuacacaaaucag

SEQ ID NO: 6 - DNA, 11 bp, Artificial Sequence
  Description of Combined DNA/RNA Molecule: Synthetic oligonucleotide
  Description of Artificial Sequence: Synthetic oligonucleotide
gauuuccaugt

SEQ ID NO: 7 - DNA, 21 bp, Artificial Sequence
  Description of Combined DNA/RNA Molecule: Synthetic oligonucleotide
  Description of Artificial Sequence: Synthetic oligonucleotide
ggaucuuauuucuucggagtt

SEQ ID NO: 8 - DNA, 21 bp, Artificial Sequence
  Description of Combined DNA/RNA Molecule: Synthetic oligonucleotide
  Description of Artificial Sequence: Synthetic oligonucleotide
cuccgaagaaauaagaucctt

SEQ ID NO: 9 - RNA, 11 nt, Artificial Sequence
  Description of Artificial Sequence: Synthetic oligonucleotide
ggaucuuauuu

SEQ ID NO: 10 - DNA, 10 bp, Artificial Sequence
  Description of Combined DNA/RNA Molecule: Synthetic oligonucleotide
  Description of Artificial Sequence: Synthetic oligonucleotide
cuucggagtt

SEQ ID NO: 11 - RNA, 27 nt, Artificial Sequence
  Description of Artificial Sequence: Synthetic oligonucleotide
cauugucuccgaagaaauaagauccuu

SEQ ID NO: 12 - RNA, 8 nt, Artificial Sequence
  Description of Artificial Sequence: Synthetic oligonucleotide
  modified_base (2): LNA-G
ggaucuua

SEQ ID NO: 13 - DNA, 17 bp, Artificial Sequence
  Description of Combined DNA/RNA Molecule: Synthetic oligonucleotide
  Description of Artificial Sequence: Synthetic oligonucleotide
uuucuucggagacaatg

SEQ ID NO: 14 - DNA, 16 bp, Artificial Sequence
  Description of Combined DNA/RNA Molecule: Synthetic oligonucleotide
  Description of Artificial Sequence: Synthetic oligonucleotide
uucuucggagacaatg

SEQ ID NO: 15 - DNA, 15 bp, Artificial Sequence
  Description of Combined DNA/RNA Molecule: Synthetic oligonucleotide
  Description of Artificial Sequence: Synthetic oligonucleotide
ucuucggagacaatg

SEQ ID NO: 16 - DNA, 14 bp, Artificial Sequence
  Description of Combined DNA/RNA Molecule: Synthetic oligonucleotide
  Description of Artificial Sequence: Synthetic oligonucleotide
cuucggagacaatg

SEQ ID NO: 17 - DNA, 13 bp, Artificial Sequence
  Description of Combined DNA/RNA Molecule: Synthetic oligonucleotide
  Description of Artificial Sequence: Synthetic oligonucleotide
uucggagacaatg

SEQ ID NO: 18 - DNA, 12 bp, Artificial Sequence
  Description of Combined DNA/RNA Molecule: Synthetic oligonucleotide
  Description of Artificial Sequence: Synthetic oligonucleotide
ucggagacaatg

SEQ ID NO: 19 - DNA, 11 bp, Artificial Sequence
  Description of Combined DNA/RNA Molecule: Synthetic oligonucleotide
  Description of Artificial Sequence: Synthetic oligonucleotide
cggagacaatg

SEQ ID NO: 20 - RNA, 9 nt, Artificial Sequence
  Description of Artificial Sequence: Synthetic oligonucleotide
  modified_base (2): LNA-G
ggaucuuau

SEQ ID NO: 21 - RNA, 10 nt, Artificial Sequence
  Description of Artificial Sequence: Synthetic oligonucleotide
  modified_base (2): LNA-G
ggaucuuauu

SEQ ID NO: 22 - RNA, 11 nt, Artificial Sequence
  Description of Artificial Sequence: Synthetic oligonucleotide
  modified_base (2): LNA-G
ggaucuuauuu

SEQ ID NO: 23 - RNA, 12 nt, Artificial Sequence
  Description of Artificial Sequence: Synthetic oligonucleotide
  modified_base (2): LNA-G
ggaucuuauuuc

SEQ ID NO: 24 - RNA, 8 nt, Artificial Sequence
  Description of Artificial Sequence: Synthetic oligonucleotide
  modified_base (3): LNA-A
cuacacaa

SEQ ID NO: 25 - DNA, 13 bp, Artificial Sequence
  Description of Artificial Sequence: Synthetic oligonucleotide
  modified_base (8): LNA-A
aucagcgauuutt

SEQ ID NO: 26 - DNA, 12 bp, Artificial Sequence
  Description of Artificial Sequence: Synthetic oligonucleotide
  modified_base (7): LNA-A
ucagcgauuutt

SEQ ID NO: 27 - DNA, 11 bp, Artificial Sequence
  Description of Artificial Sequence: Synthetic oligonucleotide
  modified_base (6): LNA-A
cagcgauuutt

SEQ ID NO: 28 - DNA, 10 bp, Artificial Sequence
  Description of Artificial Sequence: Synthetic oligonucleotide
  modified_base (5): LNA-A
agcgauuutt

SEQ ID NO: 29 - DNA, 9 bp, Artificial Sequence
  Description of Artificial Sequence: Synthetic oligonucleotide
  modified_base (4): LNA-A
gcgauuutt

SEQ ID NO: 30 - DNA, 8 bp, Artificial Sequence
  Description of Artificial Sequence: Synthetic oligonucleotide
  modified_base (3): LNA-A
cgauuutt

SEQ ID NO: 31 - DNA, 7 bp, Artificial Sequence
  Description of Artificial Sequence: Synthetic oligonucleotide
  modified_base (2): LNA-A
gauuutt

SEQ ID NO: 32 - RNA, 9 nt, Artificial Sequence
  Description of Artificial Sequence: Synthetic oligonucleotide
  modified_base (3): LNA-A
cuacacaaa

SEQ ID NO: 33 - RNA, 10 nt, Artificial Sequence
  Description of Artificial Sequence: Synthetic oligonucleotide
  modified_base (3): LNA-A
cuacacaaau

SEQ ID NO: 34 - RNA, 11 nt, Artificial Sequence
  Description of Artificial Sequence: Synthetic oligonucleotide
  modified_base (3): LNA-A
cuacacaaauc

SEQ ID NO: 35 - RNA, 12 nt, Artificial Sequence
  Description of Artificial Sequence: Synthetic oligonucleotide
  modified_base (3): LNA-A
cuacacaaauca

SEQ ID NO: 36 - RNA, 13 nt, Artificial Sequence
  Description of Artificial Sequence: Synthetic oligonucleotide
  modified_base (3): LNA-A
cuacacaaaucag

SEQ ID NO: 37 - RNA, 14 nt, Artificial Sequence
  Description of Artificial Sequence: Synthetic oligonucleotide
  modified_base (3): LNA-A
cuacacaaaucagc

SEQ ID NO: 38 - RNA, 13 nt, Artificial Sequence
  Description of Artificial Sequence: Synthetic oligonucleotide
  modified_base (2): LNA-G
ggaucuuauuucu

SEQ ID NO: 39 - RNA, 14 nt, Artificial Sequence
  Description of Artificial Sequence: Synthetic oligonucleotide
  modified_base (2): LNA-G
ggaucuuauuucuu

SEQ ID NO: 40 - RNA, 8 nt, Artificial Sequence
  Description of Artificial Sequence: Synthetic oligonucleotide
  modified_base (2): LNA-G
  modified_base (8): LNA-A
ggaucuua

SEQ ID NO: 41 - RNA, 9 nt, Artificial Sequence
  Description of Artificial Sequence: Synthetic oligonucleotide
  modified_base (2): LNA-G
  modified_base (9): LNA-U
ggaucuuau

SEQ ID NO: 42 - RNA, 10 nt, Artificial Sequence
  Description of Artificial Sequence: Synthetic oligonucleotide
  modified_base (2): LNA-G
  modified_base (10): LNA-U
ggaucuuauu

SEQ ID NO: 43 - RNA, 11 nt, Artificial Sequence
  Description of Artificial Sequence: Synthetic oligonucleotide
  modified_base (2): LNA-G
  modified_base (11): LNA-U
ggaucuuauuu

SEQ ID NO: 44 - RNA, 12 nt, Artificial Sequence
  Description of Artificial Sequence: Synthetic oligonucleotide
  modified_base (2): LNA-G
  modified_base (12): LNA-C
ggaucuuauuuc

SEQ ID NO: 45 - RNA, 13 nt, Artificial Sequence
  Description of Artificial Sequence: Synthetic oligonucleotide
  modified_base (2): LNA-G
  modified_base (13): LNA-U
ggaucuuauuucu

SEQ ID NO: 46 - RNA, 14 nt, Artificial Sequence
  Description of Artificial Sequence: Synthetic oligonucleotide
  modified_base (2): LNA-G
  modified_base (14): LNA-U
ggaucuuauuucuu

SEQ ID NO: 47 - DNA, 13 bp, Artificial Sequence
  Description of Combined DNA/RNA Molecule: Synthetic oligonucleotide
  Description of Artificial Sequence: Synthetic oligonucleotide
  modified_base (8): LNA-G
uuucuucggagtt

SEQ ID NO: 48 - DNA, 12 bp, Artificial Sequence
  Description of Combined DNA/RNA Molecule: Synthetic oligonucleotide
  Description of Artificial Sequence: Synthetic oligonucleotide
  modified_base (7): LNA-G
uucuucggagtt

SEQ ID NO: 49 - DNA, 11 bp, Artificial Sequence
  Description of Combined DNA/RNA Molecule: Synthetic oligonucleotide
  Description of Artificial Sequence: Synthetic oligonucleotide
  modified_base (6): LNA-G
ucuucggagtt

SEQ ID NO: 50 - DNA, 10 bp, Artificial Sequence
  Description of Combined DNA/RNA Molecule: Synthetic oligonucleotide
  Description of Artificial Sequence: Synthetic oligonucleotide
  modified_base (5): LNA-G
cuucggagtt

SEQ ID NO: 51 - DNA, 9 bp, Artificial Sequence
  Description of Combined DNA/RNA Molecule: Synthetic oligonucleotide
  Description of Artificial Sequence: Synthetic oligonucleotide
  modified_base (4): LNA-G
uucggagtt

SEQ ID NO: 52 - DNA, 8 bp, Artificial Sequence
  Description of Combined DNA/RNA Molecule: Synthetic oligonucleotide
  Description of Artificial Sequence: Synthetic oligonucleotide
  modified_base (3): LNA-G
ucggagtt

SEQ ID NO: 53 - DNA, 7 bp, Artificial Sequence
  Description of Combined DNA/RNA Molecule: Synthetic oligonucleotide
  Description of Artificial Sequence: Synthetic oligonucleotide
  modified_base (2): LNA-G
cggagtt

SEQ ID NO: 54 - DNA, 13 bp, Artificial Sequence
  Description of Combined DNA/RNA Molecule: Synthetic oligonucleotide
  Description of Artificial Sequence: Synthetic oligonucleotide
  modified_base (1): LNA-U
  modified_base (8): LNA-G
uuucuucggagtt

SEQ ID NO: 55 - DNA, 12 bp, Artificial Sequence
  Description of Combined DNA/RNA Molecule: Synthetic oligonucleotide
  Description of Artificial Sequence: Synthetic oligonucleotide
  modified_base (1): LNA-U
  modified_base (7): LNA-G
uucuucggagtt

SEQ ID NO: 56 - DNA, 11 bp, Artificial Sequence
  Description of Combined DNA/RNA Molecule: Synthetic oligonucleotide
  Description of Artificial Sequence: Synthetic oligonucleotide
  modified_base (1): LNA-U
  modified_base (6): LNA-G
ucuucggagtt

SEQ ID NO: 57 - DNA, 10 bp, Artificial Sequence
  Description of Combined DNA/RNA Molecule: Synthetic oligonucleotide
  Description of Artificial Sequence: Synthetic oligonucleotide
  modified_base (1): LNA-C
  modified_base (5): LNA-G
cuucggagtt

SEQ ID NO: 58 - DNA, 9 bp, Artificial Sequence
  Description of Combined DNA/RNA Molecule: Synthetic oligonucleotide
  Description of Artificial Sequence: Synthetic oligonucleotide
  modified_base (1): LNA-U
  modified_base (4): LNA-G
uucggagtt

SEQ ID NO: 59 - DNA, 8 bp, Artificial Sequence
  Description of Combined DNA/RNA Molecule: Synthetic oligonucleotide
  Description of Artificial Sequence: Synthetic oligonucleotide
  modified_base (1): LNA-U
  modified_base (3): LNA-G
ucggagtt

SEQ ID NO: 60 - DNA, 7 bp, Artificial Sequence
  Description of Combined DNA/RNA Molecule: Synthetic oligonucleotide
  Description of Artificial Sequence: Synthetic oligonucleotide
  modified_base (1): LNA-C
  modified_base (2): LNA-G
cggagtt

SEQ ID NO: 61 - DNA, 21 bp, Artificial Sequence
  Description of Combined DNA/RNA Molecule: Synthetic oligonucleotide
  Description of Artificial Sequence: Synthetic oligonucleotide
  modified_base (2): LNA-G
  modified_base (16): LNA-G
ggaucuuauuucuucggagtt

SEQ ID NO: 62 - DNA, 25 bp, Artificial Sequence
  Description of Combined DNA/RNA Molecule: Synthetic oligonucleotide
  Description of Artificial Sequence: Synthetic oligonucleotide
ggaucuuauuucuucggagacaatg

SEQ ID NO: 63 - RNA, 25 nt, Artificial Sequence
  Description of Artificial Sequence: Synthetic oligonucleotide
guauuuugaugaggaguucacggcc

SEQ ID NO: 64 - RNA, 25 nt, Artificial Sequence
  Description of Artificial Sequence: Synthetic oligonucleotide
ggcccagaugaucaccaucacacca

SEQ ID NO: 65 - RNA, 25 nt, Artificial Sequence
  Description of Artificial Sequence: Synthetic oligonucleotide
gggaagaaaacuauccugcggguuu

SEQ ID NO: 66 - RNA, 25 nt, Artificial Sequence
  Description of Artificial Sequence: Synthetic oligonucleotide
guuuuaauuuauuucauccaguuug

SEQ ID NO: 67 - RNA, 25 nt, Artificial Sequence
  Description of Artificial Sequence: Synthetic oligonucleotide
acguagggaaauguuaaggacuucu

SEQ ID NO: 68 - RNA, 25 nt, Artificial Sequence
  Description of Artificial Sequence: Synthetic oligonucleotide
ccaggguuuacccagugggacagag

SEQ ID NO: 69 - RNA, 25 nt, Artificial Sequence
  Description of Artificial Sequence: Synthetic oligonucleotide
agcaagguuuaaauuuguuauugug

SEQ ID NO: 70 - RNA, 25 nt, Artificial Sequence
  Description of Artificial Sequence: Synthetic oligonucleotide
uguauuauguuguucaaaugcauuu

SEQ ID NO: 71 - RNA, 25 nt, Artificial Sequence
  Description of Artificial Sequence: Synthetic oligonucleotide
uuuuaaucuuugugacaggaaagcc

SEQ ID NO: 72 - RNA, 25 nt, Artificial Sequence
  Description of Artificial Sequence: Synthetic oligonucleotide
uuaaucuuugugacaggaaagcccu

SEQ ID NO: 73 - RNA, 25 nt, Artificial Sequence
  Description of Artificial Sequence: Synthetic oligonucleotide
gcugcuuaugucucccagcauggcc

SEQ ID NO: 74 - RNA, 25 nt, Artificial Sequence
  Description of Artificial Sequence: Synthetic oligonucleotide
aaguguuucagaagcuucucccuga

SEQ ID NO: 75 - RNA, 25 nt, Artificial Sequence
  Description of Artificial Sequence: Synthetic oligonucleotide
gaccaucaauaaggaagaagcccuu

SEQ ID NO: 76 - RNA, 25 nt, Artificial Sequence
  Description of Artificial Sequence: Synthetic oligonucleotide
ccaucaauaaggaagaagcccuuca

SEQ ID NO: 77 - RNA, 25 nt, Artificial Sequence
  Description of Artificial Sequence: Synthetic oligonucleotide
ucaauaaggaagaagcccuucagcg

SEQ ID NO: 78 - RNA, 25 nt, Artificial Sequence
  Description of Artificial Sequence: Synthetic oligonucleotide
aauaaggaagaagcccuucagcggc

SEQ ID NO: 79 - RNA, 25 nt, Artificial Sequence
  Description of Artificial Sequence: Synthetic oligonucleotide
aggaagaagcccuucagcggccagu

SEQ ID NO: 80 - RNA, 25 nt, Artificial Sequence
  Description of Artificial Sequence: Synthetic oligonucleotide
gcauaacuaaaggugaaaagcuccg

SEQ ID NO: 81 - RNA, 25 nt, Artificial Sequence
  Description of Artificial Sequence: Synthetic oligonucleotide
cauaacuaaaggugaaaagcuccgg

SEQ ID NO: 82 - RNA, 25 nt, Artificial Sequence
  Description of Artificial Sequence: Synthetic oligonucleotide
cuacaucacgccagucaacagucug

SEQ ID NO: 83 - RNA, 25 nt, Artificial Sequence
  Description of Artificial Sequence: Synthetic oligonucleotide
acuggauuuaagcagaguucaaaag

SEQ ID NO: 84 - RNA, 25 nt, Artificial Sequence
  Description of Artificial Sequence: Synthetic oligonucleotide
cuggauuuaagcagaguucaaaagc

SEQ ID NO: 85 - RNA, 25 nt, Artificial Sequence
  Description of Artificial Sequence: Synthetic oligonucleotide
gauuuaagcagaguucaaaagcccu

SEQ ID NO: 86 - RNA, 25 nt, Artificial Sequence
  Description of Artificial Sequence: Synthetic oligonucleotide
auuuaagcagaguucaaaagcccuu

SEQ ID NO: 87 - RNA, 25 nt, Artificial Sequence
  Description of Artificial Sequence: Synthetic oligonucleotide
uuaagcagaguucaaaagcccuuca

SEQ ID NO: 88 - RNA, 25 nt, Artificial Sequence
  Description of Artificial Sequence: Synthetic oligonucleotide
uaagcagaguucaaaagcccuucag

SEQ ID NO: 89 - RNA, 25 nt, Artificial Sequence
  Description of Artificial Sequence: Synthetic oligonucleotide
agcagaguucaaaagcccuucagcg

SEQ ID NO: 90 - RNA, 25 nt, Artificial Sequence
  Description of Artificial Sequence: Synthetic oligonucleotide
cucagggucugagugaagccgcucg

SEQ ID NO: 91 - RNA, 25 nt, Artificial Sequence
  Description of Artificial Sequence: Synthetic oligonucleotide
caagcaacuacaucacgccagucaa

SEQ ID NO: 92 - RNA, 25 nt, Artificial Sequence
  Description of Artificial Sequence: Synthetic oligonucleotide
aucaauggcagcuucuuggugcgug

SEQ ID NO: 93 - RNA, 25 nt, Artificial Sequence
  Description of Artificial Sequence: Synthetic oligonucleotide
uuccagcccacauuggauucaucag

SEQ ID NO: 94 - RNA, 25 nt, Artificial Sequence
  Description of Artificial Sequence: Synthetic oligonucleotide
cagcugagaauguggaauaccuaag

SEQ ID NO: 95 - RNA, 25 nt, Artificial Sequence
  Description of Artificial Sequence: Synthetic oligonucleotide
aacguaucuccuaauuugaggcuca

SEQ ID NO: 96 - RNA, 25 nt, Artificial Sequence
  Description of Artificial Sequence: Synthetic oligonucleotide
ccuaaaauaauuucucuacaauugg

SEQ ID NO: 97 - RNA, 25 nt, Artificial Sequence
  Description of Artificial Sequence: Synthetic oligonucleotide
uggaagauucagcuaguuaggagcc

SEQ ID NO: 98 - RNA, 25 nt, Artificial Sequence
  Description of Artificial Sequence: Synthetic oligonucleotide
uuaaacucuccuagucaauauccac

SEQ ID NO: 99 - RNA, 25 nt, Artificial Sequence
  Description of Artificial Sequence: Synthetic oligonucleotide
cagccuacaguuauguucagucaca

SEQ ID NO: 100 - RNA, 25 nt, Artificial Sequence
  Description of Artificial Sequence: Synthetic oligonucleotide
guuauguucagucacacacacauac

SEQ ID NO: 101 - RNA, 25 nt, Artificial Sequence
  Description of Artificial Sequence: Synthetic oligonucleotide
cacauacaaaauguuccuuuugcuu

SEQ ID NO: 102 - RNA, 25 nt, Artificial Sequence
  Description of Artificial Sequence: Synthetic oligonucleotide
uccuuuugcuuuuaaaguaauuuuu

SEQ ID NO: 103 - RNA, 25 nt, Artificial Sequence
  Description of Artificial Sequence: Synthetic oligonucleotide
ugaccugugaagcaacagucaaugg

SEQ ID NO: 104 - RNA, 25 nt, Artificial Sequence
  Description of Artificial Sequence: Synthetic oligonucleotide
cuaucucacacaucgacaaaccaau

SEQ ID NO: 105 - RNA, 25 nt, Artificial Sequence
  Description of Artificial Sequence: Synthetic oligonucleotide
uguccucaauuguacugcuaccacu

SEQ ID NO: 106 - RNA, 25 nt, Artificial Sequence
  Description of Artificial Sequence: Synthetic oligonucleotide
aaaccguagcuggcaagcggucuua

SEQ ID NO: 107 - RNA, 25 nt, Artificial Sequence
  Description of Artificial Sequence: Synthetic oligonucleotide
uagcuggcaagcggucuuaccggcu

SEQ ID NO: 108 - RNA, 25 nt, Artificial Sequence
  Description of Artificial Sequence: Synthetic oligonucleotide
uuguaugguuaaaagauggguuacc

SEQ ID NO: 109 - RNA, 25 nt, Artificial Sequence
  Description of Artificial Sequence: Synthetic oligonucleotide
ugguuaaaagauggguuaccugcga

SEQ ID NO: 110 - RNA, 25 nt, Artificial Sequence
  Description of Artificial Sequence: Synthetic oligonucleotide
cagggaauuauacaaucuugcugag

SEQ ID NO: 111 - RNA, 25 nt, Artificial Sequence
  Description of Artificial Sequence: Synthetic oligonucleotide
acaaucuugcugagcauaaaacagu

SEQ ID NO: 112 - RNA, 25 nt, Artificial Sequence
  Description of Artificial Sequence: Synthetic oligonucleotide
ccaauaaugaagaguccuuuauccu

SEQ ID NO: 113 - RNA, 25 nt, Artificial Sequence
  Description of Artificial Sequence: Synthetic oligonucleotide
acuuuggauguuccaacgcaaguug

SEQ ID NO: 114 - RNA, 25 nt, Artificial Sequence
  Description of Artificial Sequence: Synthetic oligonucleotide
aaugcuuccacuaaacugaaaccau

SEQ ID NO: 115 - RNA, 25 nt, Artificial Sequence
  Description of Artificial Sequence: Synthetic oligonucleotide
gagaaaguuugacuuuguuaaauau

SEQ ID NO: 116 - RNA, 25 nt, Artificial Sequence
  Description of Artificial Sequence: Synthetic oligonucleotide
aaagaacuacuguauauuaaaaguu

SEQ ID NO: 117 - RNA, 25 nt, Artificial Sequence
  Description of Artificial Sequence: Synthetic oligonucleotide
uuagaaauacggguuuugacuuaac

SEQ ID NO: 118 - RNA, 25 nt, Artificial Sequence
  Description of Artificial Sequence: Synthetic oligonucleotide
aacauggguacagcaaacucagcac

SEQ ID NO: 119 - RNA, 25 nt, Artificial Sequence
  Description of Artificial Sequence: Synthetic oligonucleotide
aaagacacagaagaugcugaccuca

SEQ ID NO: 120 - RNA, 25 nt, Artificial Sequence
  Description of Artificial Sequence: Synthetic oligonucleotide
uaguagggagguuuauucagaucgc

SEQ ID NO: 121 - RNA, 25 nt, Artificial Sequence
  Description of Artificial Sequence: Synthetic oligonucleotide
gccuucugcagcaggguucugggau

SEQ ID NO: 122 - RNA, 25 nt, Artificial Sequence
  Description of Artificial Sequence: Synthetic oligonucleotide
ggucugguacauauuggaaauuaug

SEQ ID NO: 123 - RNA, 25 nt, Artificial Sequence
  Description of Artificial Sequence: Synthetic oligonucleotide
cuaguccuuccgauggaagcacuag

SEQ ID NO: 124 - RNA, 25 nt, Artificial Sequence
  Description of Artificial Sequence: Synthetic oligonucleotide
ccagugaauauuguuuuuaugugga

SEQ ID NO: 125 - RNA, 25 nt, Artificial Sequence
  Description of Artificial Sequence: Synthetic oligonucleotide
augaauucaaguuggaauugguaga

SEQ ID NO: 126 - RNA, 25 nt, Artificial Sequence
  Description of Artificial Sequence: Synthetic oligonucleotide
caggacacagauuuagacuuggaga

SEQ ID NO: 127 - RNA, 25 nt, Artificial Sequence
  Description of Artificial Sequence: Synthetic oligonucleotide
cucaaagcacaguuacaguauucca

SEQ ID NO: 128 - RNA, 25 nt, Artificial Sequence
  Description of Artificial Sequence: Synthetic oligonucleotide
accacugccaccacugaugaauuaa

SEQ ID NO: 129 - RNA, 25 nt, Artificial Sequence
  Description of Artificial Sequence: Synthetic oligonucleotide
gaaacuacuagugccacaucaucac

SEQ ID NO: 130 - RNA, 25 nt, Artificial Sequence
  Description of Artificial Sequence: Synthetic oligonucleotide
aagucggacagccucaccaaacaga

SEQ ID NO: 131 - RNA, 25 nt, Artificial Sequence
  Description of Artificial Sequence: Synthetic oligonucleotide
gaaagcgaaaaauggaacaugaugg

SEQ ID NO: 132 - RNA, 25 nt, Artificial Sequence
  Description of Artificial Sequence: Synthetic oligonucleotide
cccucugauuuagcauguagacugc

SEQ ID NO: 133 - RNA, 25 nt, Artificial Sequence
  Description of Artificial Sequence: Synthetic oligonucleotide
ugagcuauuuaaggaucuauuuaug

SEQ ID NO: 134 - RNA, 25 nt, Artificial Sequence
  Description of Artificial Sequence: Synthetic oligonucleotide
aaaaggugaaaaagcacuauuauca

SEQ ID NO: 135 - RNA, 25 nt, Artificial Sequence
  Description of Artificial Sequence: Synthetic oligonucleotide
gaaaaagcacuauuaucaguucugc

SEQ ID NO: 136 - RNA, 25 nt, Artificial Sequence
  Description of Artificial Sequence: Synthetic oligonucleotide
ggcugaaaagaaagauuaaaccuac

SEQ ID NO: 137 - RNA, 25 nt, Artificial Sequence
  Description of Artificial Sequence: Synthetic oligonucleotide
uaaacccuuauaauaaaauccuucu

SEQ ID NO: 138 - RNA, 25 nt, Artificial Sequence
  Description of Artificial Sequence: Synthetic oligonucleotide
cauacuauuagccaaugcuguagac

SEQ ID NO: 139 - RNA, 25 nt, Artificial Sequence
  Description of Artificial Sequence: Synthetic oligonucleotide
gacagaagcauuuugauaggaauag

SEQ ID NO: 140 - RNA, 25 nt, Artificial Sequence
  Description of Artificial Sequence: Synthetic oligonucleotide
agagcaaauaagauaauggcccuga

SEQ ID NO: 141 - RNA, 25 nt, Artificial Sequence
  Description of Artificial Sequence: Synthetic oligonucleotide
ccaacauuuuucucuuccucaagca

SEQ ID NO: 142 - RNA, 25 nt, Artificial Sequence
  Description of Artificial Sequence: Synthetic oligonucleotide
uuaaguaugagaaaaguucagccca

SEQ ID NO: 143 - RNA, 25 nt, Artificial Sequence
  Description of Artificial Sequence: Synthetic oligonucleotide
caggaauaaagauggcugcugaacc

SEQ ID NO: 144 - RNA, 25 nt, Artificial Sequence
  Description of Artificial Sequence: Synthetic oligonucleotide
aauuugaaugaccaaguucucuuca

SEQ ID NO: 145 - RNA, 25 nt, Artificial Sequence
  Description of Artificial Sequence: Synthetic oligonucleotide
auguauaaagauagccagccuagag

SEQ ID NO: 146 - RNA, 25 nt, Artificial Sequence
  Description of Artificial Sequence: Synthetic oligonucleotide
ggcuguaacuaucucugugaagugu

SEQ ID NO: 147 - RNA, 25 nt, Artificial Sequence
  Description of Artificial Sequence: Synthetic oligonucleotide
ucugugaagugugagaaaauuucaa

SEQ ID NO: 148 - RNA, 25 nt, Artificial Sequence
  Description of Artificial Sequence: Synthetic oligonucleotide
ccuuuaaggaaaugaauccuccuga

SEQ ID NO: 149 - RNA, 25 nt, Artificial Sequence
  Description of Artificial Sequence: Synthetic oligonucleotide
aaggauacaaaaagugacaucauau

SEQ ID NO: 150 - RNA, 25 nt, Artificial Sequence
  Description of Artificial Sequence: Synthetic oligonucleotide
agaugcaauuugaaucuucaucaua

SEQ ID NO: 151 - RNA, 25 nt, Artificial Sequence
  Description of Artificial Sequence: Synthetic oligonucleotide
guucaaaacgaagacuagcuauuaa

SEQ ID NO: 152 - RNA, 25 nt, Artificial Sequence
  Description of Artificial Sequence: Synthetic oligonucleotide
gugaaaccucaucucuacuaaaaau

SEQ ID NO: 153 - RNA, 25 nt, Artificial Sequence
  Description of Artificial Sequence: Synthetic oligonucleotide
acgaaagagaagcucuaucucgccu

SEQ ID NO: 154 - RNA, 25 nt, Artificial Sequence
  Description of Artificial Sequence: Synthetic oligonucleotide
cuccacaagcgccuucgguccaguu

SEQ ID NO: 155 - RNA, 25 nt, Artificial Sequence
  Description of Artificial Sequence: Synthetic oligonucleotide
gagaagauuccaaagauguagccgc

SEQ ID NO: 156 - RNA, 25 nt, Artificial Sequence
  Description of Artificial Sequence: Synthetic oligonucleotide
aaucuggauucaaugaggagacuug

SEQ ID NO: 157 - RNA, 25 nt, Artificial Sequence
  Description of Artificial Sequence: Synthetic oligonucleotide
agaacagauuugagaguagugagga

SEQ ID NO: 158 - RNA, 25 nt, Artificial Sequence
  Description of Artificial Sequence: Synthetic oligonucleotide
ccagagcugugcagaugaguacaaa

SEQ ID NO: 159 - RNA, 25 nt, Artificial Sequence
  Description of Artificial Sequence: Synthetic oligonucleotide
ccucagauuguuguuguuaaugggc

SEQ ID NO: 160 - RNA, 25 nt, Artificial Sequence
  Description of Artificial Sequence: Synthetic oligonucleotide
cuauuuuaauuauuuuuaauuuauu

SEQ ID NO: 161 - RNA, 25 nt, Artificial Sequence
  Description of Artificial Sequence: Synthetic oligonucleotide
uuuaauuuauuaauauuuaaauaug

SEQ ID NO: 162 - RNA, 25 nt, Artificial Sequence
  Description of Artificial Sequence: Synthetic oligonucleotide
augcaguuugaauauccuuuguuuc

SEQ ID NO: 163 - RNA, 25 nt, Artificial Sequence
  Description of Artificial Sequence: Synthetic oligonucleotide
caugcugcuggcgucuaaguguuug

SEQ ID NO: 164 - RNA, 25 nt, Artificial Sequence
  Description of Artificial Sequence: Synthetic oligonucleotide
agaugugcauuucaccugugacaaa

SEQ ID NO: 165 - RNA, 25 nt, Artificial Sequence
  Description of Artificial Sequence: Synthetic oligonucleotide
ucaaaaccugugccaggcugaauua

SEQ ID NO: 166 - RNA, 25 nt, Artificial Sequence
  Description of Artificial Sequence: Synthetic oligonucleotide
gaauguggguagucauucuuacaau

SEQ ID NO: 167 - RNA, 25 nt, Artificial Sequence
  Description of Artificial Sequence: Synthetic oligonucleotide
auguggguagucauucuuacaauug

SEQ ID NO: 168 - RNA, 25 nt, Artificial Sequence
  Description of Artificial Sequence: Synthetic oligonucleotide
ugaaaaugagcaucagagaguguac

SEQ ID NO: 169 - RNA, 25 nt, Artificial Sequence
  Description of Artificial Sequence: Synthetic oligonucleotide
uugcuuuucauguagaacucagcag

SEQ ID NO: 170 - RNA, 25 nt, Artificial Sequence
  Description of Artificial Sequence: Synthetic oligonucleotide
uguauuucuauauuuauuuucagua

SEQ ID NO: 171 - RNA, 25 nt, Artificial Sequence
  Description of Artificial Sequence: Synthetic oligonucleotide
uuugauuaauguuucuuaaauggaa

SEQ ID NO: 172 - RNA, 25 nt, Artificial Sequence
  Description of Artificial Sequence: Synthetic oligonucleotide
caacguguauagugccuaaaauugu

SEQ ID NO: 173 - RNA, 25 nt, Artificial Sequence
  Description of Artificial Sequence: Synthetic oligonucleotide
cauauccuuggcuacuaacaucugg

SEQ ID NO: 174 - RNA, 25 nt, Artificial Sequence
  Description of Artificial Sequence: Synthetic oligonucleotide
uacuaacaucuggagacugugagcu

SEQ ID NO: 175 - RNA, 25 nt, Artificial Sequence
  Description of Artificial Sequence: Synthetic oligonucleotide
cauaaguugugugcuuuuuauuaau

SEQ ID NO: 176 - RNA, 25 nt, Artificial Sequence
  Description of Artificial Sequence: Synthetic oligonucleotide
gcaucauuuuggcucuucuuacauu

SEQ ID NO: 177 - RNA, 25 nt, Artificial Sequence
  Description of Artificial Sequence: Synthetic oligonucleotide
gcucuucuuacauuuguaaaaaugu

SEQ ID NO: 178 - RNA, 25 nt, Artificial Sequence
  Description of Artificial Sequence: Synthetic oligonucleotide
agauuaggucaucuuaauucauauu

SEQ ID NO: 179 - RNA, 25 nt, Artificial Sequence
  Description of Artificial Sequence: Synthetic oligonucleotide
auggaauugaaagaacuaaucauga

SEQ ID NO: 180 - RNA, 25 nt, Artificial Sequence
  Description of Artificial Sequence: Synthetic oligonucleotide
cacacucauuccuucugcucuuggg

SEQ ID NO: 181 - RNA, 25 nt, Artificial Sequence
  Description of Artificial Sequence: Synthetic oligonucleotide
uguagagguaaccaguagcuuugag

SEQ ID NO: 182 - RNA, 25 nt, Artificial Sequence
  Description of Artificial Sequence: Synthetic oligonucleotide
caaccacaugccacguaauauuuca

SEQ ID NO: 183 - RNA, 25 nt, Artificial Sequence
  Description of Artificial Sequence: Synthetic oligonucleotide
ucggaaacaaguuauucucuucacu

SEQ ID NO: 184 - RNA, 25 nt, Artificial Sequence
  Description of Artificial Sequence: Synthetic oligonucleotide
acucccaauaacuaaugcuaagaaa

SEQ ID NO: 185 - RNA, 25 nt, Artificial Sequence
  Description of Artificial Sequence: Synthetic oligonucleotide
aaugcuaagaaaugcugaaaaucaa

SEQ ID NO: 186 - RNA, 25 nt, Artificial Sequence
  Description of Artificial Sequence: Synthetic oligonucleotide
gucuuucucuaaauaugauuacuuu

SEQ ID NO: 187 - RNA, 25 nt, Artificial Sequence
  Description of Artificial Sequence: Synthetic oligonucleotide
ugaauuucaggcauuuuguucuaca

SEQ ID NO: 188 - RNA, 25 nt, Artificial Sequence
  Description of Artificial Sequence: Synthetic oligonucleotide
cgauucccucucacccgggacucuc

SEQ ID NO: 189 - RNA, 25 nt, Artificial Sequence
  Description of Artificial Sequence: Synthetic oligonucleotide
aggaaagugaaccuuuaaaguaaag

SEQ ID NO: 190 - RNA, 25 nt, Artificial Sequence
  Description of Artificial Sequence: Synthetic oligonucleotide
gaggcugcaugcucuggaagccugg

SEQ ID NO: 191 - RNA, 25 nt, Artificial Sequence
  Description of Artificial Sequence: Synthetic oligonucleotide
ucucugaacagaaaacaaaagagag

SEQ ID NO: 192 - RNA, 25 nt, Artificial Sequence
  Description of Artificial Sequence: Synthetic oligonucleotide
aacuuggcuguaaucaguuaugccg

SEQ ID NO: 193 - RNA, 25 nt, Artificial Sequence
  Description of Artificial Sequence: Synthetic oligonucleotide
agaagccaaaauuaaaagaagucca

SEQ ID NO: 194 - RNA, 25 nt, Artificial Sequence
  Description of Artificial Sequence: Synthetic oligonucleotide
auuaaaagaaguccaggugagguua

SEQ ID NO: 195 - RNA, 25 nt, Artificial Sequence
  Description of Artificial Sequence: Synthetic oligonucleotide
gaauccggauuaucgggaagaggac

SEQ ID NO: 196 - RNA, 25 nt, Artificial Sequence
  Description of Artificial Sequence: Synthetic oligonucleotide
aaugugacaucaaagcaaguauugu

SEQ ID NO: 197 - RNA, 25 nt, Artificial Sequence
  Description of Artificial Sequence: Synthetic oligonucleotide
caucaaagcaaguauuguagcacuc

SEQ ID NO: 198 - RNA, 25 nt, Artificial Sequence
  Description of Artificial Sequence: Synthetic oligonucleotide
agagagagaaaacaaaaccacaaau

SEQ ID NO: 199 - RNA, 25 nt, Artificial Sequence
  Description of Artificial Sequence: Synthetic oligonucleotide
ucgcuguaguauuuaagcccauaca

SEQ ID NO: 200 - RNA, 25 nt, Artificial Sequence
  Description of Artificial Sequence: Synthetic oligonucleotide
cgcuguaguauuuaagcccauacag

SEQ ID NO: 201 - RNA, 25 nt, Artificial Sequence
  Description of Artificial Sequence: Synthetic oligonucleotide
auuuaagcccauacagaaaccuucc

SEQ ID NO: 202 - RNA, 25 nt, Artificial Sequence
  Description of Artificial Sequence: Synthetic oligonucleotide
auuaaaauaaacaugguauaccuac

SEQ ID NO: 203 - RNA, 25 nt, Artificial Sequence
  Description of Artificial Sequence: Synthetic oligonucleotide
cuguucugaucggccaguuuucgga

SEQ ID NO: 204 - RNA, 25 nt, Artificial Sequence
  Description of Artificial Sequence: Synthetic oligonucleotide
aaauaauuugaacuuuggaacaggg

SEQ ID NO: 205 - RNA, 25 nt, Artificial Sequence
  Description of Artificial Sequence: Synthetic oligonucleotide
ugcgaccuuaauuuaacuuuccagu

SEQ ID NO: 206 - RNA, 25 nt, Artificial Sequence
  Description of Artificial Sequence: Synthetic oligonucleotide
cugagaaagcuaaaguuugguuuug

SEQ ID NO: 207 - RNA, 25 nt, Artificial Sequence
  Description of Artificial Sequence: Synthetic oligonucleotide
aguaaagaugcuacuucccacugua

SEQ ID NO: 208 - RNA, 25 nt, Artificial Sequence
  Description of Artificial Sequence: Synthetic oligonucleotide
cugcuuaauugcugauaccauauga

SEQ ID NO: 209 - RNA, 25 nt, Artificial Sequence
  Description of Artificial Sequence: Synthetic oligonucleotide
uaccauaugaaugaaacaugggcug

SEQ ID NO: 210 - RNA, 25 nt, Artificial Sequence
  Description of Artificial Sequence: Synthetic oligonucleotide
aacuuucuuauccaacuuuuucaua

SEQ ID NO: 211 - RNA, 25 nt, Artificial Sequence
  Description of Artificial Sequence: Synthetic oligonucleotide
ccuugcaugacaucaugaggccgga

SEQ ID NO: 212 - RNA, 25 nt, Artificial Sequence
  Description of Artificial Sequence: Synthetic oligonucleotide
ugaauuuguauaugacugcauuugu

SEQ ID NO: 213 - RNA, 25 nt, Artificial Sequence
  Description of Artificial Sequence: Synthetic oligonucleotide
gaauccuaguagaauguuuacuacc

SEQ ID NO: 214 - RNA, 25 nt, Artificial Sequence
  Description of Artificial Sequence: Synthetic oligonucleotide
gaaagggaagaauuuuuugaugaaa

SEQ ID NO: 215 - RNA, 25 nt, Artificial Sequence
  Description of Artificial Sequence: Synthetic oligonucleotide
uaucggcaugccagugugugaauuu

SEQ ID NO: 216 - RNA, 25 nt, Artificial Sequence
  Description of Artificial Sequence: Synthetic oligonucleotide
caccucauaguagagcaauguaugu

SEQ ID NO: 217 - RNA, 25 nt, Artificial Sequence
  Description of Artificial Sequence: Synthetic oligonucleotide
ccagaauugccaaagcacauauaua

SEQ ID NO: 218 - RNA, 25 nt, Artificial Sequence
  Description of Artificial Sequence: Synthetic oligonucleotide
uggugaucuggguaauaguuucucc

SEQ ID NO: 219 - RNA, 25 nt, Artificial Sequence
  Description of Artificial Sequence: Synthetic oligonucleotide
gaucuggguaauaguuucuccaaau

SEQ ID NO: 220 - RNA, 25 nt, Artificial Sequence
  Description of Artificial Sequence: Synthetic oligonucleotide
ggaugugaugaauacuuccuagaaa

SEQ ID NO: 221 - RNA, 25 nt, Artificial Sequence
  Description of Artificial Sequence: Synthetic oligonucleotide
cauuuccacagcuacaccauauaug

SEQ ID NO: 222 - RNA, 25 nt, Artificial Sequence
  Description of Artificial Sequence: Synthetic oligonucleotide
acagcuacaccauauaugaauggag

SEQ ID NO: 223 - RNA, 25 nt, Artificial Sequence
  Description of Artificial Sequence: Synthetic oligonucleotide
ugcaguucuuacacgagaagaagau

SEQ ID NO: 224 - RNA, 25 nt, Artificial Sequence
  Description of Artificial Sequence: Synthetic oligonucleotide
acgagaagaagaucauuuacaggga

SEQ ID NO: 225 - RNA, 25 nt, Artificial Sequence
  Description of Artificial Sequence: Synthetic oligonucleotide
cgagaagaagaucauuuacagggac

SEQ ID NO: 226 - RNA, 25 nt, Artificial Sequence
  Description of Artificial Sequence: Synthetic oligonucleotide
aagaagaucauuuacagggaccuga

SEQ ID NO: 227 - RNA, 25 nt, Artificial Sequence
  Description of Artificial Sequence: Synthetic oligonucleotide
agaggaagagguguuugacugcauc

SEQ ID NO: 228 - RNA, 25 nt, Artificial Sequence
  Description of Artificial Sequence: Synthetic oligonucleotide
gaggaagagguguuugacugcaucg

SEQ ID NO: 229 - RNA, 25 nt, Artificial Sequence
  Description of Artificial Sequence: Synthetic oligonucleotide
cuacuuugagggcgaguucacaggg

SEQ ID NO: 230 - RNA, 25 nt, Artificial Sequence
  Description of Artificial Sequence: Synthetic oligonucleotide
agggcaucuccuggcaccucugucc

SEQ ID NO: 231 - RNA, 25 nt, Artificial Sequence
  Description of Artificial Sequence: Synthetic oligonucleotide
ggagugauaugguuugucuuuuuaa

SEQ ID NO: 232 - RNA, 25 nt, Artificial Sequence
  Description of Artificial Sequence: Synthetic oligonucleotide
gagugauaugguuugucuuuuuaag

SEQ ID NO: 233 - RNA, 25 nt, Artificial Sequence
  Description of Artificial Sequence: Synthetic oligonucleotide
ugcaguaaagauccuaaagguuguc

SEQ ID NO: 234 - RNA, 25 nt, Artificial Sequence
  Description of Artificial Sequence: Synthetic oligonucleotide
aguaaagauccuaaagguugucgac

SEQ ID NO: 235 - RNA, 25 nt, Artificial Sequence
  Description of Artificial Sequence: Synthetic oligonucleotide
ugacaaaggacaaccuggcaauugu

SEQ ID NO: 236 - RNA, 25 nt, Artificial Sequence
  Description of Artificial Sequence: Synthetic oligonucleotide
gcaauugugacccaguggugcgagg

SEQ ID NO: 237 - RNA, 25 nt, Artificial Sequence
  Description of Artificial Sequence: Synthetic oligonucleotide
aacaucauccauagagacaugaaau

SEQ ID NO: 238 - RNA, 25 nt, Artificial Sequence
  Description of Artificial Sequence: Synthetic oligonucleotide
ugaaauccaacaauauauuucucca

SEQ ID NO: 239 - RNA, 25 nt, Artificial Sequence
  Description of Artificial Sequence: Synthetic oligonucleotide
aacaauauauuucuccaugaaggcu

SEQ ID NO: 240 - RNA, 25 nt, Artificial Sequence
  Description of Artificial Sequence: Synthetic oligonucleotide
aacaguaaagucacgcuggaguggu

SEQ ID NO: 241 - RNA, 25 nt, Artificial Sequence
  Description of Artificial Sequence: Synthetic oligonucleotide
ugugaagaaaguaaaggaagagagg

SEQ ID NO: 242 - RNA, 25 nt, Artificial Sequence
  Description of Artificial Sequence: Synthetic oligonucleotide
cuuccgagccauccuugcaucgggc

SEQ ID NO: 243 - RNA, 25 nt, Artificial Sequence
  Description of Artificial Sequence: Synthetic oligonucleotide
aauggagguugaauauccuacugug

SEQ ID NO: 244 - RNA, 25 nt, Artificial Sequence
  Description of Artificial Sequence: Synthetic oligonucleotide
ggagguugaauauccuacuguguaa

SEQ ID NO: 245 - RNA, 25 nt, Artificial Sequence
  Description of Artificial Sequence: Synthetic oligonucleotide
auuuugaguuuucccuuguagugua

SEQ ID NO: 246 - RNA, 25 nt, Artificial Sequence
  Description of Artificial Sequence: Synthetic oligonucleotide
uauccuguuuguucuuuguugauug

SEQ ID NO: 247 - RNA, 25 nt, Artificial Sequence
  Description of Artificial Sequence: Synthetic oligonucleotide
ccuguuuguucuuuguugauugaaa

SEQ ID NO: 248 - RNA, 25 nt, Artificial Sequence
  Description of Artificial Sequence: Synthetic oligonucleotide
cucuacagccuucuuuuucuuccau

SEQ ID NO: 249 - RNA, 25 nt, Artificial Sequence
  Description of Artificial Sequence: Synthetic oligonucleotide
ucuuccauagcuaaucuuccuucua

SEQ ID NO: 250 - RNA, 25 nt, Artificial Sequence
  Description of Artificial Sequence: Synthetic oligonucleotide
auaaucuuccuguugaaugcuucau

SEQ ID NO: 251 - RNA, 25 nt, Artificial Sequence
  Description of Artificial Sequence: Synthetic oligonucleotide
uaaucuuccuguugaaugcuucaug

SEQ ID NO: 252 - RNA, 25 nt, Artificial Sequence
  Description of Artificial Sequence: Synthetic oligonucleotide
cuucaugacuugaauucuacuuuga

SEQ ID NO: 253 - RNA, 25 nt, Artificial Sequence
  Description of Artificial Sequence: Synthetic oligonucleotide
aagagggagagaagcaacuacagac

SEQ ID NO: 254 - RNA, 25 nt, Artificial Sequence
  Description of Artificial Sequence: Synthetic oligonucleotide
cgucuccuaccagaccaaggucaac

SEQ ID NO: 255 - RNA, 25 nt, Artificial Sequence
  Description of Artificial Sequence: Synthetic oligonucleotide
gaucaaucggcccgacuaucucgac

SEQ ID NO: 256 - RNA, 25 nt, Artificial Sequence
  Description of Artificial Sequence: Synthetic oligonucleotide
ggacgaacauccaaccuucccaaac

SEQ ID NO: 257 - RNA, 25 nt, Artificial Sequence
  Description of Artificial Sequence: Synthetic oligonucleotide
agggucggaacccaagcuuagaacu

SEQ ID NO: 258 - RNA, 25 nt, Artificial Sequence
  Description of Artificial Sequence: Synthetic oligonucleotide
ucggaacccaagcuuagaacuuuaa

SEQ ID NO: 259 - RNA, 25 nt, Artificial Sequence
  Description of Artificial Sequence: Synthetic oligonucleotide
acccaagcuuagaacuuuaagcaac

SEQ ID NO: 260 - RNA, 25 nt, Artificial Sequence
  Description of Artificial Sequence: Synthetic oligonucleotide
gaacuuuaagcaacaagaccaccac

SEQ ID NO: 261 - RNA, 25 nt, Artificial Sequence
  Description of Artificial Sequence: Synthetic oligonucleotide
acuauucaguggcgagaaauaaagu

SEQ ID NO: 262 - RNA, 25 nt, Artificial Sequence
  Description of Artificial Sequence: Synthetic oligonucleotide
cuauucaguggcgagaaauaaaguu

SEQ ID NO: 263 - RNA, 25 nt, Artificial Sequence
  Description of Artificial Sequence: Synthetic oligonucleotide
aaacacagauaacaggaaaugaucc

SEQ ID NO: 264 - RNA, 25 nt, Artificial Sequence
  Description of Artificial Sequence: Synthetic oligonucleotide
cuuaagaaaagagaagaaaugaaac

SEQ ID NO: 265 - RNA, 25 nt, Artificial Sequence
  Description of Artificial Sequence: Synthetic oligonucleotide
cugaaggaguguguuuccauccucc

SEQ ID NO: 266 - RNA, 25 nt, Artificial Sequence
  Description of Artificial Sequence: Synthetic oligonucleotide
ucaccgcgggacugaaaaucuuuga

SEQ ID NO: 267 - RNA, 25 nt, Artificial Sequence
  Description of Artificial Sequence: Synthetic oligonucleotide
agcagaaauaagcgugccguucagg

SEQ ID NO: 268 - RNA, 25 nt, Artificial Sequence
  Description of Artificial Sequence: Synthetic oligonucleotide
aagcgugccguucaggguccagaag

SEQ ID NO: 269 - RNA, 25 nt, Artificial Sequence
  Description of Artificial Sequence: Synthetic oligonucleotide
agaaacagucacucaagacugcuug

SEQ ID NO: 270 - RNA, 25 nt, Artificial Sequence
  Description of Artificial Sequence: Synthetic oligonucleotide
agaggaagaagguccaugucuuugg

SEQ ID NO: 271 - RNA, 25 nt, Artificial Sequence
  Description of Artificial Sequence: Synthetic oligonucleotide
uguauucaaaauaugccugaaacac

SEQ ID NO: 272 - RNA, 25 nt, Artificial Sequence
  Description of Artificial Sequence: Synthetic oligonucleotide
auuuuccucccuuucucuguaccuc

SEQ ID NO: 273 - RNA, 25 nt, Artificial Sequence
  Description of Artificial Sequence: Synthetic oligonucleotide
caaagaaagauagagcaagacaaga

SEQ ID NO: 274 - RNA, 25 nt, Artificial Sequence
  Description of Artificial Sequence: Synthetic oligonucleotide
aagaaagauagagcaagacaagaaa

SEQ ID NO: 275 - RNA, 25 nt, Artificial Sequence
  Description of Artificial Sequence: Synthetic oligonucleotide
gaaagcauuuguuuguacaagaucc

SEQ ID NO: 276 - RNA, 25 nt, Artificial Sequence
  Description of Artificial Sequence: Synthetic oligonucleotide
ugaguuaaacgaacguacuugcaga

SEQ ID NO: 277 - RNA, 25 nt, Artificial Sequence
  Description of Artificial Sequence: Synthetic oligonucleotide
acugauacagaacgaucgauacaga

SEQ ID NO: 278 - RNA, 25 nt, Artificial Sequence
  Description of Artificial Sequence: Synthetic oligonucleotide
auauuauauauauauaaaaauaaau

SEQ ID NO: 279 - RNA, 25 nt, Artificial Sequence
  Description of Artificial Sequence: Synthetic oligonucleotide
auuauauauauauaaaaauaaauau

SEQ ID NO: 280 - RNA, 25 nt, Artificial Sequence
  Description of Artificial Sequence: Synthetic oligonucleotide
ucacuggauguauuugacugcugug

SEQ ID NO: 281 - RNA, 25 nt, Artificial Sequence
  Description of Artificial Sequence: Synthetic oligonucleotide
cagggaagaggaggagaugagagac

SEQ ID NO: 282 - RNA, 25 nt, Artificial Sequence
  Description of Artificial Sequence: Synthetic oligonucleotide
augaucuuuuuuuugucccacuugg

SEQ ID NO: 283 - RNA, 27 nt, Artificial Sequence
  Description of Artificial Sequence: Synthetic oligonucleotide
ggccgugaacuccucaucaaaauaccu

SEQ ID NO: 284 - RNA, 27 nt, Artificial Sequence
  Description of Artificial Sequence: Synthetic oligonucleotide
uggugugauggugaucaucugggccgu

SEQ ID NO: 285 - RNA, 27 nt, Artificial Sequence
  Description of Artificial Sequence: Synthetic oligonucleotide
aaacccgcaggauaguuuucuucccua

SEQ ID NO: 286 - RNA, 27 nt, Artificial Sequence
  Description of Artificial Sequence: Synthetic oligonucleotide
caaacuggaugaaauaaauuaaaaccc

SEQ ID NO: 287 - RNA, 27 nt, Artificial Sequence
  Description of Artificial Sequence: Synthetic oligonucleotide
agaaguccuuaacauuucccuacguga

SEQ ID NO: 288 - RNA, 27 nt, Artificial Sequence
  Description of Artificial Sequence: Synthetic oligonucleotide
cucugucccacuggguaaacccuggcc

SEQ ID NO: 289 - RNA, 27 nt, Artificial Sequence
  Description of Artificial Sequence: Synthetic oligonucleotide
cacaauaacaaauuuaaaccuugcucc

SEQ ID NO: 290 - RNA, 27 nt, Artificial Sequence
  Description of Artificial Sequence: Synthetic oligonucleotide
aaaugcauuugaacaacauaauacaca

SEQ ID NO: 291 - RNA, 27 nt, Artificial Sequence
  Description of Artificial Sequence: Synthetic oligonucleotide
ggcuuuccugucacaaagauuaaaaac

SEQ ID NO: 292 - RNA, 27 nt, Artificial Sequence
  Description of Artificial Sequence: Synthetic oligonucleotide
agggcuuuccugucacaaagauuaaaa

SEQ ID NO: 293 - RNA, 27 nt, Artificial Sequence
  Description of Artificial Sequence: Synthetic oligonucleotide
ggccaugcugggagacauaagcagcag

SEQ ID NO: 294 - RNA, 27 nt, Artificial Sequence
  Description of Artificial Sequence: Synthetic oligonucleotide
ucagggagaagcuucugaaacacuucu

SEQ ID NO: 295 - RNA, 27 nt, Artificial Sequence
  Description of Artificial Sequence: Synthetic oligonucleotide
aagggcuucuuccuuauugauggucag

SEQ ID NO: 296 - RNA, 27 nt, Artificial Sequence
  Description of Artificial Sequence: Synthetic oligonucleotide
ugaagggcuucuuccuuauugaugguc

SEQ ID NO: 297 - RNA, 27 nt, Artificial Sequence
  Description of Artificial Sequence: Synthetic oligonucleotide
cgcugaagggcuucuuccuuauugaug

SEQ ID NO: 298 - RNA, 27 nt, Artificial Sequence
  Description of Artificial Sequence: Synthetic oligonucleotide
gccgcugaagggcuucuuccuuauuga

SEQ ID NO: 299 - RNA, 27 nt, Artificial Sequence
  Description of Artificial Sequence: Synthetic oligonucleotide
acuggccgcugaagggcuucuuccuua

SEQ ID NO: 300 - RNA, 27 nt, Artificial Sequence
  Description of Artificial Sequence: Synthetic oligonucleotide
cggagcuuuucaccuuuaguuaugcuu

SEQ ID NO: 301 - RNA, 27 nt, Artificial Sequence
  Description of Artificial Sequence: Synthetic oligonucleotide
ccggagcuuuucaccuuuaguuaugcu

SEQ ID NO: 302 - RNA, 27 nt, Artificial Sequence
  Description of Artificial Sequence: Synthetic oligonucleotide
cagacuguugacuggcgugauguaguu

SEQ ID NO: 303 - RNA, 27 nt, Artificial Sequence
  Description of Artificial Sequence: Synthetic oligonucleotide
cuuuugaacucugcuuaaauccagugg

SEQ ID NO: 304 - RNA, 27 nt, Artificial Sequence
  Description of Artificial Sequence: Synthetic oligonucleotide
gcuuuugaacucugcuuaaauccagug

SEQ ID NO: 305 - RNA, 27 nt, Artificial Sequence
  Description of Artificial Sequence: Synthetic oligonucleotide
agggcuuuugaacucugcuuaaaucca

SEQ ID NO: 306 - RNA, 27 nt, Artificial Sequence
  Description of Artificial Sequence: Synthetic oligonucleotide
aagggcuuuugaacucugcuuaaaucc

SEQ ID NO: 307 - RNA, 27 nt, Artificial Sequence
  Description of Artificial Sequence: Synthetic oligonucleotide
ugaagggcuuuugaacucugcuuaaau

SEQ ID NO: 308 - RNA, 27 nt, Artificial Sequence
  Description of Artificial Sequence: Synthetic oligonucleotide
cugaagggcuuuugaacucugcuuaaa

SEQ ID NO: 309 - RNA, 27 nt, Artificial Sequence
  Description of Artificial Sequence: Synthetic oligonucleotide
cgcugaagggcuuuugaacucugcuua

SEQ ID NO: 310 - RNA, 27 nt, Artificial Sequence
  Description of Artificial Sequence: Synthetic oligonucleotide
cgagcggcuucacucagacccugaggc

SEQ ID NO: 311 - RNA, 27 nt, Artificial Sequence
  Description of Artificial Sequence: Synthetic oligonucleotide
uugacuggcgugauguaguugcuuggg

SEQ ID NO: 312 - RNA, 27 nt, Artificial Sequence
  Description of Artificial Sequence: Synthetic oligonucleotide
cacgcaccaagaagcugccauugaucc

SEQ ID NO: 313 - RNA, 27 nt, Artificial Sequence
  Description of Artificial Sequence: Synthetic oligonucleotide
cugaugaauccaaugugggcuggaauc

SEQ ID NO: 314 - RNA, 27 nt, Artificial Sequence
  Description of Artificial Sequence: Synthetic oligonucleotide
cuuagguauuccacauucucagcugug

SEQ ID NO: 315 - RNA, 27 nt, Artificial Sequence
  Description of Artificial Sequence: Synthetic oligonucleotide
ugagccucaaauuaggagauacguuuu

SEQ ID NO: 316 - RNA, 27 nt, Artificial Sequence
  Description of Artificial Sequence: Synthetic oligonucleotide
ccaauuguagagaaauuauuuuaggaa

SEQ ID NO: 317 - RNA, 27 nt, Artificial Sequence
  Description of Artificial Sequence: Synthetic oligonucleotide
ggcuccuaacuagcugaaucuuccaau

SEQ ID NO: 318 - RNA, 27 nt, Artificial Sequence
  Description of Artificial Sequence: Synthetic oligonucleotide
guggauauugacuaggagaguuuaaaa

SEQ ID NO: 319 - RNA, 27 nt, Artificial Sequence
  Description of Artificial Sequence: Synthetic oligonucleotide
ugugacugaacauaacuguaggcugaa

SEQ ID NO: 320 - RNA, 27 nt, Artificial Sequence
  Description of Artificial Sequence: Synthetic oligonucleotide
guaugugugugugacugaacauaacug

SEQ ID NO: 321 - RNA, 27 nt, Artificial Sequence
  Description of Artificial Sequence: Synthetic oligonucleotide
aagcaaaaggaacauuuuguaugugug

SEQ ID NO: 322 - RNA, 27 nt, Artificial Sequence
  Description of Artificial Sequence: Synthetic oligonucleotide
aaaaauuacuuuaaaagcaaaaggaac

SEQ ID NO: 323 - RNA, 27 nt, Artificial Sequence
  Description of Artificial Sequence: Synthetic oligonucleotide
ccauugacuguugcuucacaggucaga

SEQ ID NO: 324 - RNA, 27 nt, Artificial Sequence
  Description of Artificial Sequence: Synthetic oligonucleotide
auugguuugucgaugugugagauaguu

SEQ ID NO: 325 - RNA, 27 nt, Artificial Sequence
  Description of Artificial Sequence: Synthetic oligonucleotide
agugguagcaguacaauugaggacaag

SEQ ID NO: 326 - RNA, 27 nt, Artificial Sequence
  Description of Artificial Sequence: Synthetic oligonucleotide
uaagaccgcuugccagcuacgguuuca

SEQ ID NO: 327 - RNA, 27 nt, Artificial Sequence
  Description of Artificial Sequence: Synthetic oligonucleotide
agccgguaagaccgcuugccagcuacg

SEQ ID NO: 328 - RNA, 27 nt, Artificial Sequence
  Description of Artificial Sequence: Synthetic oligonucleotide
gguaacccaucuuuuaaccauacaacu

SEQ ID NO: 329 - RNA, 27 nt, Artificial Sequence
  Description of Artificial Sequence: Synthetic oligonucleotide
ucgcagguaacccaucuuuuaaccaua

SEQ ID NO: 330 - RNA, 27 nt, Artificial Sequence
  Description of Artificial Sequence: Synthetic oligonucleotide
cucagcaagauuguauaauucccugca

SEQ ID NO: 331 - RNA, 27 nt, Artificial Sequence
  Description of Artificial Sequence: Synthetic oligonucleotide
acuguuuuaugcucagcaagauuguau

SEQ ID NO: 332 - RNA, 27 nt, Artificial Sequence
  Description of Artificial Sequence: Synthetic oligonucleotide
aggauaaaggacucuucauuauuggaa

SEQ ID NO: 333 - RNA, 27 nt, Artificial Sequence
  Description of Artificial Sequence: Synthetic oligonucleotide
caacuugcguuggaacauccaaagugu

SEQ ID NO: 334 - RNA, 27 nt, Artificial Sequence
  Description of Artificial Sequence: Synthetic oligonucleotide
augguuucaguuuaguggaagcauuua

SEQ ID NO: 335 - RNA, 27 nt, Artificial Sequence
  Description of Artificial Sequence: Synthetic oligonucleotide
auauuuaacaaagucaaacuuucucac

SEQ ID NO: 336 - RNA, 27 nt, Artificial Sequence
  Description of Artificial Sequence: Synthetic oligonucleotide
aacuuuuaauauacaguaguucuuuuc

SEQ ID NO: 337 - RNA, 27 nt, Artificial Sequence
  Description of Artificial Sequence: Synthetic oligonucleotide
guuaagucaaaacccguauuucuaaag

SEQ ID NO: 338 - RNA, 27 nt, Artificial Sequence
  Description of Artificial Sequence: Synthetic oligonucleotide
gugcugaguuugcuguacccauguuga

SEQ ID NO: 339 - RNA, 27 nt, Artificial Sequence
  Description of Artificial Sequence: Synthetic oligonucleotide
ugaggucagcaucuucugugucuuuac

SEQ ID NO: 340 - RNA, 27 nt, Artificial Sequence
  Description of Artificial Sequence: Synthetic oligonucleotide
gcgaucugaauaaaccucccuacuagc

SEQ ID NO: 341 - RNA, 27 nt, Artificial Sequence
  Description of Artificial Sequence: Synthetic oligonucleotide
aucccagaacccugcugcagaaggcca

SEQ ID NO: 342 - RNA, 27 nt, Artificial Sequence
  Description of Artificial Sequence: Synthetic oligonucleotide
cauaauuuccaauauguaccagaccuu

SEQ ID NO: 343 - RNA, 27 nt, Artificial Sequence
  Description of Artificial Sequence: Synthetic oligonucleotide
cuagugcuuccaucggaaggacuaggu

SEQ ID NO: 344 - RNA, 27 nt, Artificial Sequence
  Description of Artificial Sequence: Synthetic oligonucleotide
uccacauaaaaacaauauucacuggga

SEQ ID NO: 345 - RNA, 27 nt, Artificial Sequence
  Description of Artificial Sequence: Synthetic oligonucleotide
ucuaccaauuccaacuugaauucauug

SEQ ID NO: 346 - RNA, 27 nt, Artificial Sequence
  Description of Artificial Sequence: Synthetic oligonucleotide
ucuccaagucuaaaucuguguccugag

SEQ ID NO: 347 - RNA, 27 nt, Artificial Sequence
  Description of Artificial Sequence: Synthetic oligonucleotide
uggaauacuguaacugugcuuugagga

SEQ ID NO: 348 - RNA, 27 nt, Artificial Sequence
  Description of Artificial Sequence: Synthetic oligonucleotide
uuaauucaucagugguggcagugguag

SEQ ID NO: 349 - RNA, 27 nt, Artificial Sequence
  Description of Artificial Sequence: Synthetic oligonucleotide
gugaugauguggcacuaguaguuucuu

SEQ ID NO: 350 - RNA, 27 nt, Artificial Sequence
  Description of Artificial Sequence: Synthetic oligonucleotide
ucuguuuggugaggcuguccgacuuug

SEQ ID NO: 351 - RNA, 27 nt, Artificial Sequence
  Description of Artificial Sequence: Synthetic oligonucleotide
ccaucauguuccauuuuucgcuuucuc

SEQ ID NO: 352 - RNA, 27 nt, Artificial Sequence
  Description of Artificial Sequence: Synthetic oligonucleotide
gcagucuacaugcuaaaucagagggua

SEQ ID NO: 353 - RNA, 27 nt, Artificial Sequence
  Description of Artificial Sequence: Synthetic oligonucleotide
cauaaauagauccuuaaauagcucaaa

SEQ ID NO: 354 - RNA, 27 nt, Artificial Sequence
  Description of Artificial Sequence: Synthetic oligonucleotide
ugauaauagugcuuuuucaccuuuuuc

SEQ ID NO: 355 - RNA, 27 nt, Artificial Sequence
  Description of Artificial Sequence: Synthetic oligonucleotide
gcagaacugauaauagugcuuuuucac

SEQ ID NO: 356 - RNA, 27 nt, Artificial Sequence
  Description of Artificial Sequence: Synthetic oligonucleotide
guagguuuaaucuuucuuuucagccau

SEQ ID NO: 357 - RNA, 27 nt, Artificial Sequence
  Description of Artificial Sequence: Synthetic oligonucleotide
agaaggauuuuauuauaaggguuuaau

SEQ ID NO: 358 - RNA, 27 nt, Artificial Sequence
  Description of Artificial Sequence: Synthetic oligonucleotide
gucuacagcauuggcuaauaguaugaa

SEQ ID NO: 359 - RNA, 27 nt, Artificial Sequence
  Description of Artificial Sequence: Synthetic oligonucleotide
cuauuccuaucaaaaugcuucugucua

SEQ ID NO: 360 - RNA, 27 nt, Artificial Sequence
  Description of Artificial Sequence: Synthetic oligonucleotide
ucagggccauuaucuuauuugcucuau

SEQ ID NO: 361 - RNA, 27 nt, Artificial Sequence
  Description of Artificial Sequence: Synthetic oligonucleotide
ugcuugaggaagagaaaaauguugguc

SEQ ID NO: 362 - RNA, 27 nt, Artificial Sequence
  Description of Artificial Sequence: Synthetic oligonucleotide
ugggcugaacuuuucucauacuuaaag

SEQ ID NO: 363 - RNA, 27 nt, Artificial Sequence
  Description of Artificial Sequence: Synthetic oligonucleotide
gguucagcagccaucuuuauuccugcg

SEQ ID NO: 364 - RNA, 27 nt, Artificial Sequence
  Description of Artificial Sequence: Synthetic oligonucleotide
ugaagagaacuuggucauucaaauuuc

SEQ ID NO: 365 - RNA, 27 nt, Artificial Sequence
  Description of Artificial Sequence: Synthetic oligonucleotide
cucuaggcuggcuaucuuuauacauac

SEQ ID NO: 366 - RNA, 27 nt, Artificial Sequence
  Description of Artificial Sequence: Synthetic oligonucleotide
acacuucacagagauaguuacagccau

SEQ ID NO: 367 - RNA, 27 nt, Artificial Sequence
  Description of Artificial Sequence: Synthetic oligonucleotide
uugaaauuuucucacacuucacagaga

SEQ ID NO: 368 - RNA, 27 nt, Artificial Sequence
  Description of Artificial Sequence: Synthetic oligonucleotide
ucaggaggauucauuuccuuaaaggaa

SEQ ID NO: 369 - RNA, 27 nt, Artificial Sequence
  Description of Artificial Sequence: Synthetic oligonucleotide
auaugaugucacuuuuuguauccuuga

SEQ ID NO: 370 - RNA, 27 nt, Artificial Sequence
  Description of Artificial Sequence: Synthetic oligonucleotide
uaugaugaagauucaaauugcaucuua

SEQ ID NO: 371 - RNA, 27 nt, Artificial Sequence
  Description of Artificial Sequence: Synthetic oligonucleotide
uuaauagcuagucuucguuuugaacag

SEQ ID NO: 372 - RNA, 27 nt, Artificial Sequence
  Description of Artificial Sequence: Synthetic oligonucleotide
auuuuuaguagagaugagguuucacca

SEQ ID NO: 373 - RNA, 27 nt, Artificial Sequence
  Description of Artificial Sequence: Synthetic oligonucleotide
aggcgagauagagcuucucuuucguuc

SEQ ID NO: 374 - RNA, 27 nt, Artificial Sequence
  Description of Artificial Sequence: Synthetic oligonucleotide
aacuggaccgaaggcgcuuguggagaa

SEQ ID NO: 375 - RNA, 27 nt, Artificial Sequence
  Description of Artificial Sequence: Synthetic oligonucleotide
gcggcuacaucuuuggaaucuucuccu

SEQ ID NO: 376 - RNA, 27 nt, Artificial Sequence
  Description of Artificial Sequence: Synthetic oligonucleotide
caagucuccucauugaauccagauugg

SEQ ID NO: 377 - RNA, 27 nt, Artificial Sequence
  Description of Artificial Sequence: Synthetic oligonucleotide
uccucacuacucucaaaucuguucugg

SEQ ID NO: 378 - RNA, 27 nt, Artificial Sequence
  Description of Artificial Sequence: Synthetic oligonucleotide
uuuguacucaucugcacagcucuggcu

SEQ ID NO: 379 - RNA, 27 nt, Artificial Sequence
  Description of Artificial Sequence: Synthetic oligonucleotide
gcccauuaacaacaacaaucugaggug

SEQ ID NO: 380 - RNA, 27 nt, Artificial Sequence
  Description of Artificial Sequence: Synthetic oligonucleotide
aauaaauuaaaaauaauuaaaauagug

SEQ ID NO: 381 - RNA, 27 nt, Artificial Sequence
  Description of Artificial Sequence: Synthetic oligonucleotide
cauauuuaaauauuaauaaauuaaaaa

SEQ ID NO: 382 - RNA, 27 nt, Artificial Sequence
  Description of Artificial Sequence: Synthetic oligonucleotide
gaaacaaaggauauucaaacugcauag

SEQ ID NO: 383 - RNA, 27 nt, Artificial Sequence
  Description of Artificial Sequence: Synthetic oligonucleotide
caaacacuuagacgccagcagcauggg

SEQ ID NO: 384 - RNA, 27 nt, Artificial Sequence
  Description of Artificial Sequence: Synthetic oligonucleotide
uuugucacaggugaaaugcacaucuga

SEQ ID NO: 385 - RNA, 27 nt, Artificial Sequence
  Description of Artificial Sequence: Synthetic oligonucleotide
uaauucagccuggcacagguuuugauc

SEQ ID NO: 386 - RNA, 27 nt, Artificial Sequence
  Description of Artificial Sequence: Synthetic oligonucleotide
auuguaagaaugacuacccacauucac

SEQ ID NO: 387 - RNA, 27 nt, Artificial Sequence
  Description of Artificial Sequence: Synthetic oligonucleotide
caauuguaagaaugacuacccacauuc

SEQ ID NO: 388 - RNA, 27 nt, Artificial Sequence
  Description of Artificial Sequence: Synthetic oligonucleotide
guacacucucugaugcucauuuucaua

SEQ ID NO: 389 - RNA, 27 nt, Artificial Sequence
  Description of Artificial Sequence: Synthetic oligonucleotide
cugcugaguucuacaugaaaagcaaau

SEQ ID NO: 390 - RNA, 27 nt, Artificial Sequence
  Description of Artificial Sequence: Synthetic oligonucleotide
uacugaaaauaaauauagaaauacaac

SEQ ID NO: 391 - RNA, 27 nt, Artificial Sequence
  Description of Artificial Sequence: Synthetic oligonucleotide
uuccauuuaagaaacauuaaucaaaac

SEQ ID NO: 392 - RNA, 27 nt, Artificial Sequence
  Description of Artificial Sequence: Synthetic oligonucleotide
acaauuuuaggcacuauacacguuguu

SEQ ID NO: 393 - RNA, 27 nt, Artificial Sequence
  Description of Artificial Sequence: Synthetic oligonucleotide
ccagauguuaguagccaaggauauggu

SEQ ID NO: 394 - RNA, 27 nt, Artificial Sequence
  Description of Artificial Sequence: Synthetic oligonucleotide
agcucacagucuccagauguuaguagc

SEQ ID NO: 395 - RNA, 27 nt, Artificial Sequence
  Description of Artificial Sequence: Synthetic oligonucleotide
auuaauaaaaagcacacaacuuauggc

SEQ ID NO: 396 - RNA, 27 nt, Artificial Sequence
  Description of Artificial Sequence: Synthetic oligonucleotide
aauguaagaagagccaaaaugaugcau

SEQ ID NO: 397 - RNA, 27 nt, Artificial Sequence
  Description of Artificial Sequence: Synthetic oligonucleotide
acauuuuuacaaauguaagaagagcca

SEQ ID NO: 398 - RNA, 27 nt, Artificial Sequence
  Description of Artificial Sequence: Synthetic oligonucleotide
aauaugaauuaagaugaccuaaucugu

SEQ ID NO: 399 - RNA, 27 nt, Artificial Sequence
  Description of Artificial Sequence: Synthetic oligonucleotide
ucaugauuaguucuuucaauuccaucc

SEQ ID NO: 400 - RNA, 27 nt, Artificial Sequence
  Description of Artificial Sequence: Synthetic oligonucleotide
cccaagagcagaaggaaugagugugca

SEQ ID NO: 401 - RNA, 27 nt, Artificial Sequence
  Description of Artificial Sequence: Synthetic oligonucleotide
cucaaagcuacugguuaccucuacacc

SEQ ID NO: 402 - RNA, 27 nt, Artificial Sequence
  Description of Artificial Sequence: Synthetic oligonucleotide
ugaaauauuacguggcaugugguuggg

SEQ ID NO: 403 - RNA, 27 nt, Artificial Sequence
  Description of Artificial Sequence: Synthetic oligonucleotide
agugaagagaauaacuuguuuccgaag

SEQ ID NO: 404 - RNA, 27 nt, Artificial Sequence
  Description of Artificial Sequence: Synthetic oligonucleotide
uuucuuagcauuaguuauugggaguga

SEQ ID NO: 405 - RNA, 27 nt, Artificial Sequence
  Description of Artificial Sequence: Synthetic oligonucleotide
uugauuuucagcauuucuuagcauuag

SEQ ID NO: 406 - RNA, 27 nt, Artificial Sequence
  Description of Artificial Sequence: Synthetic oligonucleotide
aaaguaaucauauuuagagaaagacag

SEQ ID NO: 407 - RNA, 27 nt, Artificial Sequence
  Description of Artificial Sequence: Synthetic oligonucleotide
uguagaacaaaaugccugaaauucagc

SEQ ID NO: 408 - RNA, 27 nt, Artificial Sequence
  Description of Artificial Sequence: Synthetic oligonucleotide
gagagucccgggugagagggaaucgcc

SEQ ID NO: 409 - RNA, 27 nt, Artificial Sequence
  Description of Artificial Sequence: Synthetic oligonucleotide
cuuuacuuuaaagguucacuuuccuug

SEQ ID NO: 410 - RNA, 27 nt, Artificial Sequence
  Description of Artificial Sequence: Synthetic oligonucleotide
ccaggcuuccagagcaugcagccuccu

SEQ ID NO: 411 - RNA, 27 nt, Artificial Sequence
  Description of Artificial Sequence: Synthetic oligonucleotide
cucucuuuuguuuucuguucagagaaa

SEQ ID NO: 412 - RNA, 27 nt, Artificial Sequence
  Description of Artificial Sequence: Synthetic oligonucleotide
cggcauaacugauuacagccaaguuca

SEQ ID NO: 413 - RNA, 27 nt, Artificial Sequence
  Description of Artificial Sequence: Synthetic oligonucleotide
uggacuucuuuuaauuuuggcuucuuc

SEQ ID NO: 414 - RNA, 27 nt, Artificial Sequence
  Description of Artificial Sequence: Synthetic oligonucleotide
uaaccucaccuggacuucuuuuaauuu

SEQ ID NO: 415 - RNA, 27 nt, Artificial Sequence
  Description of Artificial Sequence: Synthetic oligonucleotide
guccucuucccgauaauccggauucag

SEQ ID NO: 416 - RNA, 27 nt, Artificial Sequence
  Description of Artificial Sequence: Synthetic oligonucleotide
acaauacuugcuuugaugucacauuaa

SEQ ID NO: 417 - RNA, 27 nt, Artificial Sequence
  Description of Artificial Sequence: Synthetic oligonucleotide
gagugcuacaauacuugcuuugauguc

SEQ ID NO: 418 - RNA, 27 nt, Artificial Sequence
  Description of Artificial Sequence: Synthetic oligonucleotide
auuugugguuuuguuuucucucucucu

SEQ ID NO: 419 - RNA, 27 nt, Artificial Sequence
  Description of Artificial Sequence: Synthetic oligonucleotide
uguaugggcuuaaauacuacagcgagg

SEQ ID NO: 420 - RNA, 27 nt, Artificial Sequence
  Description of Artificial Sequence: Synthetic oligonucleotide
cuguaugggcuuaaauacuacagcgag

SEQ ID NO: 421 - RNA, 27 nt, Artificial Sequence
  Description of Artificial Sequence: Synthetic oligonucleotide
ggaagguuucuguaugggcuuaaauac

SEQ ID NO: 422 - RNA, 27 nt, Artificial Sequence
  Description of Artificial Sequence: Synthetic oligonucleotide
guagguauaccauguuuauuuuaauac

SEQ ID NO: 423 - RNA, 27 nt, Artificial Sequence
  Description of Artificial Sequence: Synthetic oligonucleotide
uccgaaaacuggccgaucagaacagcc

SEQ ID NO: 424 - RNA, 27 nt, Artificial Sequence
  Description of Artificial Sequence: Synthetic oligonucleotide
cccuguuccaaaguucaaauuauuugu

SEQ ID NO: 425 - RNA, 27 nt, Artificial Sequence
  Description of Artificial Sequence: Synthetic oligonucleotide
acuggaaaguuaaauuaaggucgcaau

SEQ ID NO: 426 - RNA, 27 nt, Artificial Sequence
  Description of Artificial Sequence: Synthetic oligonucleotide
caaaaccaaacuuuagcuuucucagcc

SEQ ID NO: 427 - RNA, 27 nt, Artificial Sequence
  Description of Artificial Sequence: Synthetic oligonucleotide
uacagugggaaguagcaucuuuacuuu

SEQ ID NO: 428 - RNA, 27 nt, Artificial Sequence
  Description of Artificial Sequence: Synthetic oligonucleotide
ucauaugguaucagcaauuaagcagua

SEQ ID NO: 429 - RNA, 27 nt, Artificial Sequence
  Description of Artificial Sequence: Synthetic oligonucleotide
cagcccauguuucauucauaugguauc

SEQ ID NO: 430 - RNA, 27 nt, Artificial Sequence
  Description of Artificial Sequence: Synthetic oligonucleotide
uaugaaaaaguuggauaagaaaguugg

SEQ ID NO: 431 - RNA, 27 nt, Artificial Sequence
  Description of Artificial Sequence: Synthetic oligonucleotide
uccggccucaugaugucaugcaaggcu

SEQ ID NO: 432 - RNA, 27 nt, Artificial Sequence
  Description of Artificial Sequence: Synthetic oligonucleotide
acaaaugcagucauauacaaauucagg

SEQ ID NO: 433 - RNA, 27 nt, Artificial Sequence
  Description of Artificial Sequence: Synthetic oligonucleotide
gguaguaaacauucuacuaggauucuu

SEQ ID NO: 434 - RNA, 27 nt, Artificial Sequence
  Description of Artificial Sequence: Synthetic oligonucleotide
uuucaucaaaaaauucuucccuuucug

SEQ ID NO: 435 - RNA, 27 nt, Artificial Sequence
  Description of Artificial Sequence: Synthetic oligonucleotide
aaauucacacacuggcaugccgauagc

SEQ ID NO: 436 - RNA, 27 nt, Artificial Sequence
  Description of Artificial Sequence: Synthetic oligonucleotide
acauacauugcucuacuaugaggugaa

SEQ ID NO: 437 - RNA, 27 nt, Artificial Sequence
  Description of Artificial Sequence: Synthetic oligonucleotide
uauauaugugcuuuggcaauucuggug

SEQ ID NO: 438 - RNA, 27 nt, Artificial Sequence
  Description of Artificial Sequence: Synthetic oligonucleotide
ggagaaacuauuacccagaucaccacu

SEQ ID NO: 439 - RNA, 27 nt, Artificial Sequence
  Description of Artificial Sequence: Synthetic oligonucleotide
auuuggagaaacuauuacccagaucac

SEQ ID NO: 440 - RNA, 27 nt, Artificial Sequence
  Description of Artificial Sequence: Synthetic oligonucleotide
uuucuaggaaguauucaucacauccac

SEQ ID NO: 441 - RNA, 27 nt, Artificial Sequence
  Description of Artificial Sequence: Synthetic oligonucleotide
cauauaugguguagcuguggaaaugcg

SEQ ID NO: 442 - RNA, 27 nt, Artificial Sequence
  Description of Artificial Sequence: Synthetic oligonucleotide
cuccauucauauaugguguagcugugg

SEQ ID NO: 443 - RNA, 27 nt, Artificial Sequence
  Description of Artificial Sequence: Synthetic oligonucleotide
aucuucuucucguguaagaacugcagc

SEQ ID NO: 444 - RNA, 27 nt, Artificial Sequence
  Description of Artificial Sequence: Synthetic oligonucleotide
ucccuguaaaugaucuucuucucgugu

SEQ ID NO: 445 - RNA, 27 nt, Artificial Sequence
  Description of Artificial Sequence: Synthetic oligonucleotide
gucccuguaaaugaucuucuucucgug

SEQ ID NO: 446 - RNA, 27 nt, Artificial Sequence
  Description of Artificial Sequence: Synthetic oligonucleotide
ucaggucccuguaaaugaucuucuucu

SEQ ID NO: 447 - RNA, 27 nt, Artificial Sequence
  Description of Artificial Sequence: Synthetic oligonucleotide
gaugcagucaaacaccucuuccucugu

SEQ ID NO: 448 - RNA, 27 nt, Artificial Sequence
  Description of Artificial Sequence: Synthetic oligonucleotide
cgaugcagucaaacaccucuuccucug

SEQ ID NO: 449 - RNA, 27 nt, Artificial Sequence
  Description of Artificial Sequence: Synthetic oligonucleotide
cccugugaacucgcccucaaaguagcg

SEQ ID NO: 450 - RNA, 27 nt, Artificial Sequence
  Description of Artificial Sequence: Synthetic oligonucleotide
ggacagaggugccaggagaugcccuca

SEQ ID NO: 451 - RNA, 27 nt, Artificial Sequence
  Description of Artificial Sequence: Synthetic oligonucleotide
uuaaaaagacaaaccauaucacuccuu

SEQ ID NO: 452 - RNA, 27 nt, Artificial Sequence
  Description of Artificial Sequence: Synthetic oligonucleotide
cuuaaaaagacaaaccauaucacuccu

SEQ ID NO: 453 - RNA, 27 nt, Artificial Sequence
  Description of Artificial Sequence: Synthetic oligonucleotide
gacaaccuuuaggaucuuuacugcaac

SEQ ID NO: 454 - RNA, 27 nt, Artificial Sequence
  Description of Artificial Sequence: Synthetic oligonucleotide
gucgacaaccuuuaggaucuuuacugc

SEQ ID NO: 455 - RNA, 27 nt, Artificial Sequence
  Description of Artificial Sequence: Synthetic oligonucleotide
acaauugccagguuguccuuugucaug

SEQ ID NO: 456 - RNA, 27 nt, Artificial Sequence
  Description of Artificial Sequence: Synthetic oligonucleotide
ccucgcaccacugggucacaauugcca

SEQ ID NO: 457 - RNA, 27 nt, Artificial Sequence
  Description of Artificial Sequence: Synthetic oligonucleotide
auuucaugucucuauggaugauguucu

SEQ ID NO: 458 - RNA, 27 nt, Artificial Sequence
  Description of Artificial Sequence: Synthetic oligonucleotide
uggagaaauauauuguuggauuucaug

SEQ ID NO: 459 - RNA, 27 nt, Artificial Sequence
  Description of Artificial Sequence: Synthetic oligonucleotide
agccuucauggagaaauauauuguugg

SEQ ID NO: 460 - RNA, 27 nt, Artificial Sequence
  Description of Artificial Sequence: Synthetic oligonucleotide
accacuccagcgugacuuuacuguugc

SEQ ID NO: 461 - RNA, 27 nt, Artificial Sequence
  Description of Artificial Sequence: Synthetic oligonucleotide
ccucucuuccuuuacuuucuucacaca

SEQ ID NO: 462 - RNA, 27 nt, Artificial Sequence
  Description of Artificial Sequence: Synthetic oligonucleotide
gcccgaugcaaggauggcucggaagcg

SEQ ID NO: 463 - RNA, 27 nt, Artificial Sequence
  Description of Artificial Sequence: Synthetic oligonucleotide
cacaguaggauauucaaccuccauuuc

SEQ ID NO: 464 - RNA, 27 nt, Artificial Sequence
  Description of Artificial Sequence: Synthetic oligonucleotide
uuacacaguaggauauucaaccuccau

SEQ ID NO: 465 - RNA, 27 nt, Artificial Sequence
  Description of Artificial Sequence: Synthetic oligonucleotide
uacacuacaagggaaaacucaaaaucu

SEQ ID NO: 466 - RNA, 27 nt, Artificial Sequence
  Description of Artificial Sequence: Synthetic oligonucleotide
caaucaacaaagaacaaacaggauaaa

SEQ ID NO: 467 - RNA, 27 nt, Artificial Sequence
  Description of Artificial Sequence: Synthetic oligonucleotide
uuucaaucaacaaagaacaaacaggau

SEQ ID NO: 468 - RNA, 27 nt, Artificial Sequence
  Description of Artificial Sequence: Synthetic oligonucleotide
auggaagaaaaagaaggcuguagagaa

SEQ ID NO: 469 - RNA, 27 nt, Artificial Sequence
  Description of Artificial Sequence: Synthetic oligonucleotide
uagaaggaagauuagcuauggaagaaa

SEQ ID NO: 470 - RNA, 27 nt, Artificial Sequence
  Description of Artificial Sequence: Synthetic oligonucleotide
augaagcauucaacaggaagauuauuu

SEQ ID NO: 471 - RNA, 27 nt, Artificial Sequence
  Description of Artificial Sequence: Synthetic oligonucleotide
caugaagcauucaacaggaagauuauu

SEQ ID NO: 472 - RNA, 27 nt, Artificial Sequence
  Description of Artificial Sequence: Synthetic oligonucleotide
ucaaaguagaauucaagucaugaagca

SEQ ID NO: 473 - RNA, 27 nt, Artificial Sequence
  Description of Artificial Sequence: Synthetic oligonucleotide
gucuguaguugcuucucucccucuuag

SEQ ID NO: 474 - RNA, 27 nt, Artificial Sequence
  Description of Artificial Sequence: Synthetic oligonucleotide
guugaccuuggucugguaggagacggc

SEQ ID NO: 475 - RNA, 27 nt, Artificial Sequence
  Description of Artificial Sequence: Synthetic oligonucleotide
gucgagauagucgggccgauugaucuc

SEQ ID NO: 476 - RNA, 27 nt, Artificial Sequence
  Description of Artificial Sequence: Synthetic oligonucleotide
guuugggaagguuggauguucguccuc

SEQ ID NO: 477 - RNA, 27 nt, Artificial Sequence
  Description of Artificial Sequence: Synthetic oligonucleotide
aguucuaagcuuggguuccgacccuaa

SEQ ID NO: 478 - RNA, 27 nt, Artificial Sequence
  Description of Artificial Sequence: Synthetic oligonucleotide
uuaaaguucuaagcuuggguuccgacc

SEQ ID NO: 479 - RNA, 27 nt, Artificial Sequence
  Description of Artificial Sequence: Synthetic oligonucleotide
guugcuuaaaguucuaagcuuggguuc

SEQ ID NO: 480 - RNA, 27 nt, Artificial Sequence
  Description of Artificial Sequence: Synthetic oligonucleotide
gugguggucuuguugcuuaaaguucua

SEQ ID NO: 481 - RNA, 27 nt, Artificial Sequence
  Description of Artificial Sequence: Synthetic oligonucleotide
acuuuauuucucgccacugaauaguag

SEQ ID NO: 482 - RNA, 27 nt, Artificial Sequence
  Description of Artificial Sequence: Synthetic oligonucleotide
aacuuuauuucucgccacugaauagua

SEQ ID NO: 483 - RNA, 27 nt, Artificial Sequence
  Description of Artificial Sequence: Synthetic oligonucleotide
ggaucauuuccuguuaucuguguuugu

SEQ ID NO: 484 - RNA, 27 nt, Artificial Sequence
  Description of Artificial Sequence: Synthetic oligonucleotide
guuucauuucuucucuuuucuuaaggc

SEQ ID NO: 485 - RNA, 27 nt, Artificial Sequence
  Description of Artificial Sequence: Synthetic oligonucleotide
ggaggauggaaacacacuccuucaguu

SEQ ID NO: 486 - RNA, 27 nt, Artificial Sequence
  Description of Artificial Sequence: Synthetic oligonucleotide
ucaaagauuuucagucccgcggugaca

SEQ ID NO: 487 - RNA, 27 nt, Artificial Sequence
  Description of Artificial Sequence: Synthetic oligonucleotide
ccugaacggcacgcuuauuucugcugu

SEQ ID NO: 488 - RNA, 27 nt, Artificial Sequence
  Description of Artificial Sequence: Synthetic oligonucleotide
cuucuggacccugaacggcacgcuuau

SEQ ID NO: 489 - RNA, 27 nt, Artificial Sequence
  Description of Artificial Sequence: Synthetic oligonucleotide
caagcagucuugagugacuguuucuuc

SEQ ID NO: 490 - RNA, 27 nt, Artificial Sequence
  Description of Artificial Sequence: Synthetic oligonucleotide
ccaaagacauggaccuucuuccucuga

SEQ ID NO: 491 - RNA, 27 nt, Artificial Sequence
  Description of Artificial Sequence: Synthetic oligonucleotide
guguuucaggcauauuuugaauacauc

SEQ ID NO: 492 - RNA, 27 nt, Artificial Sequence
  Description of Artificial Sequence: Synthetic oligonucleotide
gagguacagagaaagggaggaaaauag

SEQ ID NO: 493 - RNA, 27 nt, Artificial Sequence
  Description of Artificial Sequence: Synthetic oligonucleotide
ucuugucuugcucuaucuuucuuuggu

SEQ ID NO: 494 - RNA, 27 nt, Artificial Sequence
  Description of Artificial Sequence: Synthetic oligonucleotide
uuucuugucuugcucuaucuuucuuug

SEQ ID NO: 495 - RNA, 27 nt, Artificial Sequence
  Description of Artificial Sequence: Synthetic oligonucleotide
ggaucuuguacaaacaaaugcuuucuc

SEQ ID NO: 496 - RNA, 27 nt, Artificial Sequence
  Description of Artificial Sequence: Synthetic oligonucleotide
ucugcaaguacguucguuuaacucaag

SEQ ID NO: 497 - RNA, 27 nt, Artificial Sequence
  Description of Artificial Sequence: Synthetic oligonucleotide
ucuguaucgaucguucuguaucagucu

SEQ ID NO: 498 - RNA, 27 nt, Artificial Sequence
  Description of Artificial Sequence: Synthetic oligonucleotide
auuuauuuuuauauauauauaauauau

SEQ ID NO: 499 - RNA, 27 nt, Artificial Sequence
  Description of Artificial Sequence: Synthetic oligonucleotide
auauuuauuuuuauauauauauaauau

SEQ ID NO: 500 - RNA, 27 nt, Artificial Sequence
  Description of Artificial Sequence: Synthetic oligonucleotide
cacagcagucaaauacauccagugaag

SEQ ID NO: 501 - RNA, 27 nt, Artificial Sequence
  Description of Artificial Sequence: Synthetic oligonucleotide
gucucucaucuccuccucuucccuguc

SEQ ID NO: 502 - RNA, 27 nt, Artificial Sequence
  Description of Artificial Sequence: Synthetic oligonucleotide
ccaagugggacaaaaaaaagaucaugc

SEQ ID NO: 503 - RNA, 14 nt, Artificial Sequence
  Description of Artificial Sequence: Synthetic oligonucleotide
guauuuugaugagg

SEQ ID NO: 504 - RNA, 12 nt, Artificial Sequence
  Description of Artificial Sequence: Synthetic oligonucleotide
ggcccagaugau

SEQ ID NO: 505 - RNA, 14 nt, Artificial Sequence
  Description of Artificial Sequence: Synthetic oligonucleotide
gggaagaaaacuau

SEQ ID NO: 506 - RNA, 15 nt, Artificial Sequence
  Description of Artificial Sequence: Synthetic oligonucleotide
guuuuaauuuauuuc

SEQ ID NO: 507 - RNA, 12 nt, Artificial Sequence
  Description of Artificial Sequence: Synthetic oligonucleotide
acguagggaaau

SEQ ID NO: 508 - RNA, 12 nt, Artificial Sequence
  Description of Artificial Sequence: Synthetic oligonucleotide
ccaggguuuacc

SEQ ID NO: 509 - RNA, 11 nt, Artificial Sequence
  Description of Artificial Sequence: Synthetic oligonucleotide
agcaagguuua

SEQ ID NO: 510 - RNA, 12 nt, Artificial Sequence
  Description of Artificial Sequence: Synthetic oligonucleotide
uguauuauguug

SEQ ID NO: 511 - RNA, 15 nt, Artificial Sequence
  Description of Artificial Sequence: Synthetic oligonucleotide
uuuuaaucuuuguga

SEQ ID NO: 512 - RNA, 14 nt, Artificial Sequence
  Description of Artificial Sequence: Synthetic oligonucleotide
uuaaucuuugugac

SEQ ID NO: 513 - RNA, 13 nt, Artificial Sequence
  Description of Artificial Sequence: Synthetic oligonucleotide
gcugcuuaugucu

SEQ ID NO: 514 - RNA, 14 nt, Artificial Sequence
  Description of Artificial Sequence: Synthetic oligonucleotide
aaguguuucagaag

SEQ ID NO: 515 - RNA, 13 nt, Artificial Sequence
  Description of Artificial Sequence: Synthetic oligonucleotide
gaccaucaauaag

SEQ ID NO: 516 - RNA, 13 nt, Artificial Sequence
  Description of Artificial Sequence: Synthetic oligonucleotide
ccaucaauaagga

SEQ ID NO: 517 - RNA, 14 nt, Artificial Sequence
  Description of Artificial Sequence: Synthetic oligonucleotide
ucaauaaggaagaa

SEQ ID NO: 518 - RNA, 14 nt, Artificial Sequence
  Description of Artificial Sequence: Synthetic oligonucleotide
aauaaggaagaagc

SEQ ID NO: 519 - RNA, 13 nt, Artificial Sequence
  Description of Artificial Sequence: Synthetic oligonucleotide
aggaagaagcccu

SEQ ID NO: 520 - RNA, 13 nt, Artificial Sequence
  Description of Artificial Sequence: Synthetic oligonucleotide
gcauaacuaaagg

SEQ ID NO: 521 - RNA, 14 nt, Artificial Sequence
  Description of Artificial Sequence: Synthetic oligonucleotide
cauaacuaaaggug

SEQ ID NO: 522 - RNA, 12 nt, Artificial Sequence
  Description of Artificial Sequence: Synthetic oligonucleotide
cuacaucacgcc

SEQ ID NO: 523 - RNA, 12 nt, Artificial Sequence
  Description of Artificial Sequence: Synthetic oligonucleotide
acuggauuuaag

SEQ ID NO: 524 - RNA, 12 nt, Artificial Sequence
  Description of Artificial Sequence: Synthetic oligonucleotide
cuggauuuaagc

SEQ ID NO: 525 - RNA, 13 nt, Artificial Sequence
  Description of Artificial Sequence: Synthetic oligonucleotide
gauuuaagcagag

SEQ ID NO: 526 - RNA, 13 nt, Artificial Sequence
  Description of Artificial Sequence: Synthetic oligonucleotide
auuuaagcagagu

SEQ ID NO: 527 - RNA, 13 nt, Artificial Sequence
  Description of Artificial Sequence: Synthetic oligonucleotide
uuaagcagaguuc

SEQ ID NO: 528 - RNA, 13 nt, Artificial Sequence
  Description of Artificial Sequence: Synthetic oligonucleotide
uaagcagaguuca

SEQ ID NO: 529 - RNA, 14 nt, Artificial Sequence
  Description of Artificial Sequence: Synthetic oligonucleotide
agcagaguucaaaa

SEQ ID NO: 530 - RNA, 12 nt, Artificial Sequence
  Description of Artificial Sequence: Synthetic oligonucleotide
cucagggucuga

SEQ ID NO: 531 - RNA, 13 nt, Artificial Sequence
  Description of Artificial Sequence: Synthetic oligonucleotide
caagcaacuacau

SEQ ID NO: 532 - RNA, 12 nt, Artificial Sequence
  Description of Artificial Sequence: Synthetic oligonucleotide
aucaauggcagc

SEQ ID NO: 533 - RNA, 11 nt, Artificial Sequence
  Description of Artificial Sequence: Synthetic oligonucleotide
uuccagcccac

SEQ ID NO: 534 - RNA, 12 nt, Artificial Sequence
  Description of Artificial Sequence: Synthetic oligonucleotide
cagcugagaaug

SEQ ID NO: 535 - RNA, 13 nt, Artificial Sequence
  Description of Artificial Sequence: Synthetic oligonucleotide
aacguaucuccua

SEQ ID NO: 536 - RNA, 14 nt, Artificial Sequence
  Description of Artificial Sequence: Synthetic oligonucleotide
ccuaaaauaauuuc

SEQ ID NO: 537 - RNA, 13 nt, Artificial Sequence
  Description of Artificial Sequence: Synthetic oligonucleotide
uggaagauucagc

SEQ ID NO: 538 - RNA, 12 nt, Artificial Sequence
  Description of Artificial Sequence: Synthetic oligonucleotide
uuaaacucuccu

SEQ ID NO: 539 - RNA, 12 nt, Artificial Sequence
  Description of Artificial Sequence: Synthetic oligonucleotide
cagccuacaguu

SEQ ID NO: 540 - RNA, 13 nt, Artificial Sequence
  Description of Artificial Sequence: Synthetic oligonucleotide
guuauguucaguc

SEQ ID NO: 541 - RNA, 13 nt, Artificial Sequence
  Description of Artificial Sequence: Synthetic oligonucleotide
cacauacaaaaug

SEQ ID NO: 542 - RNA, 9 nt, Artificial Sequence
  Description of Artificial Sequence: Synthetic oligonucleotide
uccuuuugc

SEQ ID NO: 543 - RNA, 12 nt, Artificial Sequence
  Description of Artificial Sequence: Synthetic oligonucleotide
ugaccugugaag

SEQ ID NO: 544 - RNA, 12 nt, Artificial Sequence
  Description of Artificial Sequence: Synthetic oligonucleotide
cuaucucacaca

SEQ ID NO: 545 - RNA, 13 nt, Artificial Sequence
  Description of Artificial Sequence: Synthetic oligonucleotide
uguccucaauugu

SEQ ID NO: 546 - RNA, 12 nt, Artificial Sequence
  Description of Artificial Sequence: Synthetic oligonucleotide
aaaccguagcug

SEQ ID NO: 547 - RNA, 12 nt, Artificial Sequence
  Description of Artificial Sequence: Synthetic oligonucleotide
uagcuggcaagc

SEQ ID NO: 548 - RNA, 14 nt, Artificial Sequence
  Description of Artificial Sequence: Synthetic oligonucleotide
uuguaugguuaaaa

SEQ ID NO: 549 - RNA, 14 nt, Artificial Sequence
  Description of Artificial Sequence: Synthetic oligonucleotide
ugguuaaaagaugg

SEQ ID NO: 550 - RNA, 13 nt, Artificial Sequence
  Description of Artificial Sequence: Synthetic oligonucleotide
cagggaauuauac

SEQ ID NO: 551 - RNA, 12 nt, Artificial Sequence
  Description of Artificial Sequence: Synthetic oligonucleotide
acaaucuugcug

SEQ ID NO: 552 - RNA, 13 nt, Artificial Sequence
  Description of Artificial Sequence: Synthetic oligonucleotide
ccaauaaugaaga

SEQ ID NO: 553 - RNA, 13 nt, Artificial Sequence
  Description of Artificial Sequence: Synthetic oligonucleotide
acuuuggauguuc

SEQ ID NO: 554 - RNA, 12 nt, Artificial Sequence
  Description of Artificial Sequence: Synthetic oligonucleotide
aaugcuuccacu

SEQ ID NO: 555 - RNA, 11 nt, Artificial Sequence
  Description of Artificial Sequence: Synthetic oligonucleotide
gagaaaguuug

SEQ ID NO: 556 - RNA, 11 nt, Artificial Sequence
  Description of Artificial Sequence: Synthetic oligonucleotide
aaagaacuacu

SEQ ID NO: 557 - RNA, 12 nt, Artificial Sequence
  Description of Artificial Sequence: Synthetic oligonucleotide
uuagaaauacgg

SEQ ID NO: 558 - RNA, 12 nt, Artificial Sequence
  Description of Artificial Sequence: Synthetic oligonucleotide
aacauggguaca

SEQ ID NO: 559 - RNA, 14 nt, Artificial Sequence
  Description of Artificial Sequence: Synthetic oligonucleotide
aaagacacagaaga

SEQ ID NO: 560 - RNA, 11 nt, Artificial Sequence
  Description of Artificial Sequence: Synthetic oligonucleotide
uaguagggagg

SEQ ID NO: 561 - RNA, 12 nt, Artificial Sequence
  Description of Artificial Sequence: Synthetic oligonucleotide
gccuucugcagc

SEQ ID NO: 562 - RNA, 10 nt, Artificial Sequence
  Description of Artificial Sequence: Synthetic oligonucleotide
ggucugguac

SEQ ID NO: 563 - RNA, 12 nt, Artificial Sequence
  Description of Artificial Sequence: Synthetic oligonucleotide
cuaguccuuccg

SEQ ID NO: 564 - RNA, 12 nt, Artificial Sequence
  Description of Artificial Sequence: Synthetic oligonucleotide
ccagugaauauu

SEQ ID NO: 565 - RNA, 13 nt, Artificial Sequence
  Description of Artificial Sequence: Synthetic oligonucleotide
augaauucaaguu

SEQ ID NO: 566 - RNA, 12 nt, Artificial Sequence
  Description of Artificial Sequence: Synthetic oligonucleotide
caggacacagau

SEQ ID NO: 567 - RNA, 12 nt, Artificial Sequence
  Description of Artificial Sequence: Synthetic oligonucleotide
cucaaagcacag

SEQ ID NO: 568 - RNA, 10 nt, Artificial Sequence
  Description of Artificial Sequence: Synthetic oligonucleotide
accacugcca

SEQ ID NO: 569 - RNA, 13 nt, Artificial Sequence
  Description of Artificial Sequence: Synthetic oligonucleotide
gaaacuacuagug

SEQ ID NO: 570 - RNA, 12 nt, Artificial Sequence
  Description of Artificial Sequence: Synthetic oligonucleotide
aagucggacagc

SEQ ID NO: 571 - RNA, 13 nt, Artificial Sequence
  Description of Artificial Sequence: Synthetic oligonucleotide
gaaagcgaaaaau

SEQ ID NO: 572 - RNA, 13 nt, Artificial Sequence
  Description of Artificial Sequence: Synthetic oligonucleotide
cccucugauuuag

SEQ ID NO: 573 - RNA, 12 nt, Artificial Sequence
  Description of Artificial Sequence: Synthetic oligonucleotide
ugagcuauuuaa

SEQ ID NO: 574 - RNA, 13 nt, Artificial Sequence
  Description of Artificial Sequence: Synthetic oligonucleotide
aaaaggugaaaaa

SEQ ID NO: 575 - RNA, 14 nt, Artificial Sequence
  Description of Artificial Sequence: Synthetic oligonucleotide
gaaaaagcacuauu

SEQ ID NO: 576 - RNA, 12 nt, Artificial Sequence
  Description of Artificial Sequence: Synthetic oligonucleotide
ggcugaaaagaa

SEQ ID NO: 577 - RNA, 12 nt, Artificial Sequence
  Description of Artificial Sequence: Synthetic oligonucleotide
uaaacccuuaua

SEQ ID NO: 578 - RNA, 13 nt, Artificial Sequence
  Description of Artificial Sequence: Synthetic oligonucleotide
cauacuauuagcc

SEQ ID NO: 579 - RNA, 12 nt, Artificial Sequence
  Description of Artificial Sequence: Synthetic oligonucleotide
gacagaagcauu

SEQ ID NO: 580 - RNA, 14 nt, Artificial Sequence
  Description of Artificial Sequence: Synthetic oligonucleotide
agagcaaauaagau

SEQ ID NO: 581 - RNA, 14 nt, Artificial Sequence
  Description of Artificial Sequence: Synthetic oligonucleotide
ccaacauuuuucuc

SEQ ID NO: 582 - RNA, 15 nt, Artificial Sequence
  Description of Artificial Sequence: Synthetic oligonucleotide
uuaaguaugagaaaa

SEQ ID NO: 583 - RNA, 14 nt, Artificial Sequence
  Description of Artificial Sequence: Synthetic oligonucleotide
caggaauaaagaug

SEQ ID NO: 584 - RNA, 13 nt, Artificial Sequence
  Description of Artificial Sequence: Synthetic oligonucleotide
aauuugaaugacc

SEQ ID NO: 585 - RNA, 14 nt, Artificial Sequence
  Description of Artificial Sequence: Synthetic oligonucleotide
auguauaaagauag

SEQ ID NO: 586 - RNA, 12 nt, Artificial Sequence
  Description of Artificial Sequence: Synthetic oligonucleotide
ggcuguaacuau

SEQ ID NO: 587 - RNA, 11 nt, Artificial Sequence
  Description of Artificial Sequence: Synthetic oligonucleotide
ucugugaagug

SEQ ID NO: 588 - RNA, 14 nt, Artificial Sequence
  Description of Artificial Sequence: Synthetic oligonucleotide
ccuuuaaggaaaug

SEQ ID NO: 589 - RNA, 13 nt, Artificial Sequence
  Description of Artificial Sequence: Synthetic oligonucleotide
aaggauacaaaaa

SEQ ID NO: 590 - RNA, 12 nt, Artificial Sequence
  Description of Artificial Sequence: Synthetic oligonucleotide
agaugcaauuug

SEQ ID NO: 591 - RNA, 12 nt, Artificial Sequence
  Description of Artificial Sequence: Synthetic oligonucleotide
guucaaaacgaa

SEQ ID NO: 592 - RNA, 11 nt, Artificial Sequence
  Description of Artificial Sequence: Synthetic oligonucleotide
gugaaaccuca

SEQ ID NO: 593 - RNA, 13 nt, Artificial Sequence
  Description of Artificial Sequence: Synthetic oligonucleotide
acgaaagagaagc

SEQ ID NO: 594 - RNA, 12 nt, Artificial Sequence
  Description of Artificial Sequence: Synthetic oligonucleotide
cuccacaagcgc

SEQ ID NO: 595 - RNA, 14 nt, Artificial Sequence
  Description of Artificial Sequence: Synthetic oligonucleotide
gagaagauuccaaa

SEQ ID NO: 596 - RNA, 13 nt, Artificial Sequence
  Description of Artificial Sequence: Synthetic oligonucleotide
aaucuggauucaa

SEQ ID NO: 597 - RNA, 13 nt, Artificial Sequence
  Description of Artificial Sequence: Synthetic oligonucleotide
agaacagauuuga

SEQ ID NO: 598 - RNA, 11 nt, Artificial Sequence
  Description of Artificial Sequence: Synthetic oligonucleotide
ccagagcugug

SEQ ID NO: 599 - RNA, 12 nt, Artificial Sequence
  Description of Artificial Sequence: Synthetic oligonucleotide
ccucagauuguu

SEQ ID NO: 600 - RNA, 12 nt, Artificial Sequence
  Description of Artificial Sequence: Synthetic oligonucleotide
cuauuuuaauua

SEQ ID NO: 601 - RNA, 13 nt, Artificial Sequence
  Description of Artificial Sequence: Synthetic oligonucleotide
uuuaauuuauuaa

SEQ ID NO: 602 - RNA, 12 nt, Artificial Sequence
  Description of Artificial Sequence: Synthetic oligonucleotide
augcaguuugaa

SEQ ID NO: 603 - RNA, 11 nt, Artificial Sequence
  Description of Artificial Sequence: Synthetic oligonucleotide
caugcugcugg

SEQ ID NO: 604 - RNA, 13 nt, Artificial Sequence
  Description of Artificial Sequence: Synthetic oligonucleotide
agaugugcauuuc

SEQ ID NO: 605 - RNA, 12 nt, Artificial Sequence
  Description of Artificial Sequence: Synthetic oligonucleotide
ucaaaaccugug

SEQ ID NO: 606 - RNA, 11 nt, Artificial Sequence
  Description of Artificial Sequence: Synthetic oligonucleotide
gaaugugggua

SEQ ID NO: 607 - RNA, 10 nt, Artificial Sequence
  Description of Artificial Sequence: Synthetic oligonucleotide
auguggguag

SEQ ID NO: 608 - RNA, 13 nt, Artificial Sequence
  Description of Artificial Sequence: Synthetic oligonucleotide
ugaaaaugagcau

SEQ ID NO: 609 - RNA, 13 nt, Artificial Sequence
  Description of Artificial Sequence: Synthetic oligonucleotide
uugcuuuucaugu

SEQ ID NO: 610 - RNA, 12 nt, Artificial Sequence
  Description of Artificial Sequence: Synthetic oligonucleotide
uguauuucuaua

SEQ ID NO: 611 - RNA, 13 nt, Artificial Sequence
  Description of Artificial Sequence: Synthetic oligonucleotide
uuugauuaauguu

SEQ ID NO: 612 - RNA, 12 nt, Artificial Sequence
  Description of Artificial Sequence: Synthetic oligonucleotide
caacguguauag

SEQ ID NO: 613 - RNA, 12 nt, Artificial Sequence
  Description of Artificial Sequence: Synthetic oligonucleotide
cauauccuuggc

SEQ ID NO: 614 - RNA, 13 nt, Artificial Sequence
  Description of Artificial Sequence: Synthetic oligonucleotide
uacuaacaucugg

SEQ ID NO: 615 - RNA, 11 nt, Artificial Sequence
  Description of Artificial Sequence: Synthetic oligonucleotide
cauaaguugug

SEQ ID NO: 616 - RNA, 12 nt, Artificial Sequence
  Description of Artificial Sequence: Synthetic oligonucleotide
gcaucauuuugg

SEQ ID NO: 617 - RNA, 10 nt, Artificial Sequence
  Description of Artificial Sequence: Synthetic oligonucleotide
gcucuucuua

SEQ ID NO: 618 - RNA, 10 nt, Artificial Sequence
  Description of Artificial Sequence: Synthetic oligonucleotide
agauuagguc

SEQ ID NO: 619 - RNA, 12 nt, Artificial Sequence
  Description of Artificial Sequence: Synthetic oligonucleotide
auggaauugaaa

SEQ ID NO: 620 - RNA, 13 nt, Artificial Sequence
  Description of Artificial Sequence: Synthetic oligonucleotide
cacacucauuccu

SEQ ID NO: 621 - RNA, 12 nt, Artificial Sequence
  Description of Artificial Sequence: Synthetic oligonucleotide
uguagagguaac

SEQ ID NO: 622 - RNA, 11 nt, Artificial Sequence
  Description of Artificial Sequence: Synthetic oligonucleotide
caaccacaugc

SEQ ID NO: 623 - RNA, 12 nt, Artificial Sequence
  Description of Artificial Sequence: Synthetic oligonucleotide
ucggaaacaagu

SEQ ID NO: 624 - RNA, 11 nt, Artificial Sequence
  Description of Artificial Sequence: Synthetic oligonucleotide
acucccaauaa

SEQ ID NO: 625 - RNA, 13 nt, Artificial Sequence
  Description of Artificial Sequence: Synthetic oligonucleotide
aaugcuaagaaau

SEQ ID NO: 626 - RNA, 11 nt, Artificial Sequence
  Description of Artificial Sequence: Synthetic oligonucleotide
gucuuucucua

SEQ ID NO: 627 - RNA, 11 nt, Artificial Sequence
  Description of Artificial Sequence: Synthetic oligonucleotide
ugaauuucagg

SEQ ID NO: 628 - RNA, 13 nt, Artificial Sequence
  Description of Artificial Sequence: Synthetic oligonucleotide
cgauucccucuca

SEQ ID NO: 629 - RNA, 11 nt, Artificial Sequence
  Description of Artificial Sequence: Synthetic oligonucleotide
aggaaagugaa

SEQ ID NO: 630 - RNA, 12 nt, Artificial Sequence
  Description of Artificial Sequence: Synthetic oligonucleotide
gaggcugcaugc

SEQ ID NO: 631 - RNA, 11 nt, Artificial Sequence
  Description of Artificial Sequence: Synthetic oligonucleotide
ucucugaacag

SEQ ID NO: 632 - RNA, 12 nt, Artificial Sequence
  Description of Artificial Sequence: Synthetic oligonucleotide
aacuuggcugua

SEQ ID NO: 633 - RNA, 12 nt, Artificial Sequence
  Description of Artificial Sequence: Synthetic oligonucleotide
agaagccaaaau

SEQ ID NO: 634 - RNA, 14 nt, Artificial Sequence
  Description of Artificial Sequence: Synthetic oligonucleotide
auuaaaagaagucc

SEQ ID NO: 635 - RNA, 14 nt, Artificial Sequence
  Description of Artificial Sequence: Synthetic oligonucleotide
gaauccggauuauc

SEQ ID NO: 636 - RNA, 12 nt, Artificial Sequence
  Description of Artificial Sequence: Synthetic oligonucleotide
aaugugacauca

SEQ ID NO: 637 - RNA, 13 nt, Artificial Sequence
  Description of Artificial Sequence: Synthetic oligonucleotide
caucaaagcaagu

SEQ ID NO: 638 - RNA, 11 nt, Artificial Sequence
  Description of Artificial Sequence: Synthetic oligonucleotide
agagagagaaa

SEQ ID NO: 639 - RNA, 13 nt, Artificial Sequence
  Description of Artificial Sequence: Synthetic oligonucleotide
ucgcuguaguauu

SEQ ID NO: 640 - RNA, 14 nt, Artificial Sequence
  Description of Artificial Sequence: Synthetic oligonucleotide
cgcuguaguauuua

SEQ ID NO: 641 - RNA, 13 nt, Artificial Sequence
  Description of Artificial Sequence: Synthetic oligonucleotide
auuuaagcccaua

SEQ ID NO: 642 - RNA, 15 nt, Artificial Sequence
  Description of Artificial Sequence: Synthetic oligonucleotide
auuaaaauaaacaug

SEQ ID NO: 643 - RNA, 12 nt, Artificial Sequence
  Description of Artificial Sequence: Synthetic oligonucleotide
cuguucugaucg

SEQ ID NO: 644 - RNA, 16 nt, Artificial Sequence
  Description of Artificial Sequence: Synthetic oligonucleotide
aaauaauuugaacuuu

SEQ ID NO: 645 - RNA, 12 nt, Artificial Sequence
  Description of Artificial Sequence: Synthetic oligonucleotide
ugcgaccuuaau

SEQ ID NO: 646 - RNA, 11 nt, Artificial Sequence
  Description of Artificial Sequence: Synthetic oligonucleotide
cugagaaagcu

SEQ ID NO: 647 - RNA, 13 nt, Artificial Sequence
  Description of Artificial Sequence: Synthetic oligonucleotide
aguaaagaugcua

SEQ ID NO: 648 - RNA, 12 nt, Artificial Sequence
  Description of Artificial Sequence: Synthetic oligonucleotide
cugcuuaauugc

SEQ ID NO: 649 - RNA, 14 nt, Artificial Sequence
  Description of Artificial Sequence: Synthetic oligonucleotide
uaccauaugaauga

SEQ ID NO: 650 - RNA, 12 nt, Artificial Sequence
  Description of Artificial Sequence: Synthetic oligonucleotide
aacuuucuuauc

SEQ ID NO: 651 - RNA, 13 nt, Artificial Sequence
  Description of Artificial Sequence: Synthetic oligonucleotide
ccuugcaugacau

SEQ ID NO: 652 - RNA, 14 nt, Artificial Sequence
  Description of Artificial Sequence: Synthetic oligonucleotide
ugaauuuguauaug

SEQ ID NO: 653 - RNA, 12 nt, Artificial Sequence
  Description of Artificial Sequence: Synthetic oligonucleotide
gaauccuaguag

SEQ ID NO: 654 - RNA, 10 nt, Artificial Sequence
  Description of Artificial Sequence: Synthetic oligonucleotide
gaaagggaag

SEQ ID NO: 655 - RNA, 11 nt, Artificial Sequence
  Description of Artificial Sequence: Synthetic oligonucleotide
uaucggcaugc

SEQ ID NO: 656 - RNA, 12 nt, Artificial Sequence
  Description of Artificial Sequence: Synthetic oligonucleotide
caccucauagua

SEQ ID NO: 657 - RNA, 11 nt, Artificial Sequence
  Description of Artificial Sequence: Synthetic oligonucleotide
ccagaauugcc

SEQ ID NO: 658 - RNA, 11 nt, Artificial Sequence
  Description of Artificial Sequence: Synthetic oligonucleotide
uggugaucugg

SEQ ID NO: 659 - RNA, 12 nt, Artificial Sequence
  Description of Artificial Sequence: Synthetic oligonucleotide
gaucuggguaau

SEQ ID NO: 660 - RNA, 12 nt, Artificial Sequence
  Description of Artificial Sequence: Synthetic oligonucleotide
ggaugugaugaa

SEQ ID NO: 661 - RNA, 12 nt, Artificial Sequence
  Description of Artificial Sequence: Synthetic oligonucleotide
cauuuccacagc

SEQ ID NO: 662 - RNA, 11 nt, Artificial Sequence
  Description of Artificial Sequence: Synthetic oligonucleotide
acagcuacacc

SEQ ID NO: 663 - RNA, 12 nt, Artificial Sequence
  Description of Artificial Sequence: Synthetic oligonucleotide
ugcaguucuuac

SEQ ID NO: 664 - RNA, 12 nt, Artificial Sequence
  Description of Artificial Sequence: Synthetic oligonucleotide
acgagaagaaga

SEQ ID NO: 665 - RNA, 12 nt, Artificial Sequence
  Description of Artificial Sequence: Synthetic oligonucleotide
cgagaagaagau

SEQ ID NO: 666 - RNA, 15 nt, Artificial Sequence
  Description of Artificial Sequence: Synthetic oligonucleotide
aagaagaucauuuac

SEQ ID NO: 667 - RNA, 11 nt, Artificial Sequence
  Description of Artificial Sequence: Synthetic oligonucleotide
agaggaagagg

SEQ ID NO: 668 - RNA, 12 nt, Artificial Sequence
  Description of Artificial Sequence: Synthetic oligonucleotide
gaggaagaggug

SEQ ID NO: 669 - RNA, 13 nt, Artificial Sequence
  Description of Artificial Sequence: Synthetic oligonucleotide
cuacuuugagggc

SEQ ID NO: 670 - RNA, 12 nt, Artificial Sequence
  Description of Artificial Sequence: Synthetic oligonucleotide
agggcaucuccu

SEQ ID NO: 671 - RNA, 10 nt, Artificial Sequence
  Description of Artificial Sequence: Synthetic oligonucleotide
ggagugauau

SEQ ID NO: 672 - RNA, 11 nt, Artificial Sequence
  Description of Artificial Sequence: Synthetic oligonucleotide
gagugauaugg

SEQ ID NO: 673 - RNA, 12 nt, Artificial Sequence
  Description of Artificial Sequence: Synthetic oligonucleotide
ugcaguaaagau

SEQ ID NO: 674 - RNA, 13 nt, Artificial Sequence
  Description of Artificial Sequence: Synthetic oligonucleotide
aguaaagauccua

SEQ ID NO: 675 - RNA, 12 nt, Artificial Sequence
  Description of Artificial Sequence: Synthetic oligonucleotide
ugacaaaggaca

SEQ ID NO: 676 - RNA, 13 nt, Artificial Sequence
  Description of Artificial Sequence: Synthetic oligonucleotide
gcaauugugaccc

SEQ ID NO: 677 - RNA, 12 nt, Artificial Sequence
  Description of Artificial Sequence: Synthetic oligonucleotide
aacaucauccau

SEQ ID NO: 678 - RNA, 12 nt, Artificial Sequence
  Description of Artificial Sequence: Synthetic oligonucleotide
ugaaauccaaca

SEQ ID NO: 679 - RNA, 15 nt, Artificial Sequence
  Description of Artificial Sequence: Synthetic oligonucleotide
aacaauauauuucuc

SEQ ID NO: 680 - RNA, 14 nt, Artificial Sequence
  Description of Artificial Sequence: Synthetic oligonucleotide
aacaguaaagucac

SEQ ID NO: 681 - RNA, 14 nt, Artificial Sequence
  Description of Artificial Sequence: Synthetic oligonucleotide
ugugaagaaaguaa

SEQ ID NO: 682 - RNA, 13 nt, Artificial Sequence
  Description of Artificial Sequence: Synthetic oligonucleotide
cuuccgagccauc

SEQ ID NO: 683 - RNA, 12 nt, Artificial Sequence
  Description of Artificial Sequence: Synthetic oligonucleotide
aauggagguuga

SEQ ID NO: 684 - RNA, 12 nt, Artificial Sequence
  Description of Artificial Sequence: Synthetic oligonucleotide
ggagguugaaua

SEQ ID NO: 685 - RNA, 13 nt, Artificial Sequence
  Description of Artificial Sequence: Synthetic oligonucleotide
auuuugaguuuuc

SEQ ID NO: 686 - RNA, 12 nt, Artificial Sequence
  Description of Artificial Sequence: Synthetic oligonucleotide
uauccuguuugu

SEQ ID NO: 687 - RNA, 11 nt, Artificial Sequence
  Description of Artificial Sequence: Synthetic oligonucleotide
ccuguuuguuc

SEQ ID NO: 688 - RNA, 10 nt, Artificial Sequence
  Description of Artificial Sequence: Synthetic oligonucleotide
cucuacagcc

SEQ ID NO: 689 - RNA, 12 nt, Artificial Sequence
  Description of Artificial Sequence: Synthetic oligonucleotide
ucuuccauagcu

SEQ ID NO: 690 - RNA, 12 nt, Artificial Sequence
  Description of Artificial Sequence: Synthetic oligonucleotide
auaaucuuccug

SEQ ID NO: 691 - RNA, 12 nt, Artificial Sequence
  Description of Artificial Sequence: Synthetic oligonucleotide
uaaucuuccugu

SEQ ID NO: 692 - RNA, 12 nt, Artificial Sequence
  Description of Artificial Sequence: Synthetic oligonucleotide
cuucaugacuug

SEQ ID NO: 693 - RNA, 12 nt, Artificial Sequence
  Description of Artificial Sequence: Synthetic oligonucleotide
aagagggagaga

SEQ ID NO: 694 - RNA, 12 nt, Artificial Sequence
  Description of Artificial Sequence: Synthetic oligonucleotide
cgucuccuacca

SEQ ID NO: 695 - RNA, 12 nt, Artificial Sequence
  Description of Artificial Sequence: Synthetic oligonucleotide
gaucaaucggcc

SEQ ID NO: 696 - RNA, 12 nt, Artificial Sequence
  Description of Artificial Sequence: Synthetic oligonucleotide
ggacgaacaucc

SEQ ID NO: 697 - RNA, 11 nt, Artificial Sequence
  Description of Artificial Sequence: Synthetic oligonucleotide
agggucggaac

SEQ ID NO: 698 - RNA, 10 nt, Artificial Sequence
  Description of Artificial Sequence: Synthetic oligonucleotide
ucggaaccca

SEQ ID NO: 699 - RNA, 11 nt, Artificial Sequence
  Description of Artificial Sequence: Synthetic oligonucleotide
acccaagcuua

SEQ ID NO: 700 - RNA, 14 nt, Artificial Sequence
  Description of Artificial Sequence: Synthetic oligonucleotide
gaacuuuaagcaac

SEQ ID NO: 701 - RNA, 11 nt, Artificial Sequence
  Description of Artificial Sequence: Synthetic oligonucleotide
acuauucagug

SEQ ID NO: 702 - RNA, 11 nt, Artificial Sequence
  Description of Artificial Sequence: Synthetic oligonucleotide
cuauucagugg

SEQ ID NO: 703 - RNA, 13 nt, Artificial Sequence
  Description of Artificial Sequence: Synthetic oligonucleotide
aaacacagauaac

SEQ ID NO: 704 - RNA, 12 nt, Artificial Sequence
  Description of Artificial Sequence: Synthetic oligonucleotide
cuuaagaaaaga

SEQ ID NO: 705 - RNA, 12 nt, Artificial Sequence
  Description of Artificial Sequence: Synthetic oligonucleotide
cugaaggagugu

SEQ ID NO: 706 - RNA, 10 nt, Artificial Sequence
  Description of Artificial Sequence: Synthetic oligonucleotide
ucaccgcggg

SEQ ID NO: 707 - RNA, 14 nt, Artificial Sequence
  Description of Artificial Sequence: Synthetic oligonucleotide
agcagaaauaagcg

SEQ ID NO: 708 - RNA, 12 nt, Artificial Sequence
  Description of Artificial Sequence: Synthetic oligonucleotide
aagcgugccguu

SEQ ID NO: 709 - RNA, 12 nt, Artificial Sequence
  Description of Artificial Sequence: Synthetic oligonucleotide
agaaacagucac

SEQ ID NO: 710 - RNA, 12 nt, Artificial Sequence
  Description of Artificial Sequence: Synthetic oligonucleotide
agaggaagaagg

SEQ ID NO: 711 - RNA, 14 nt, Artificial Sequence
  Description of Artificial Sequence: Synthetic oligonucleotide
uguauucaaaauau

SEQ ID NO: 712 - RNA, 13 nt, Artificial Sequence
  Description of Artificial Sequence: Synthetic oligonucleotide
auuuuccucccuu

SEQ ID NO: 713 - RNA, 13 nt, Artificial Sequence
  Description of Artificial Sequence: Synthetic oligonucleotide
caaagaaagauag

SEQ ID NO: 714 - RNA, 12 nt, Artificial Sequence
  Description of Artificial Sequence: Synthetic oligonucleotide
aagaaagauaga

SEQ ID NO: 715 - RNA, 13 nt, Artificial Sequence
  Description of Artificial Sequence: Synthetic oligonucleotide
gaaagcauuuguu

SEQ ID NO: 716 - RNA, 13 nt, Artificial Sequence
  Description of Artificial Sequence: Synthetic oligonucleotide
ugaguuaaacgaa

SEQ ID NO: 717 - RNA, 12 nt, Artificial Sequence
  Description of Artificial Sequence: Synthetic oligonucleotide
acugauacagaa

SEQ ID NO: 718 - RNA, 12 nt, Artificial Sequence
  Description of Artificial Sequence: Synthetic oligonucleotide
auauuauauaua

SEQ ID NO: 719 - RNA, 12 nt, Artificial Sequence
  Description of Artificial Sequence: Synthetic oligonucleotide
auuauauauaua

SEQ ID NO: 720 - RNA, 12 nt, Artificial Sequence
  Description of Artificial Sequence: Synthetic oligonucleotide
ucacuggaugua

SEQ ID NO: 721 - RNA, 12 nt, Artificial Sequence
  Description of Artificial Sequence: Synthetic oligonucleotide
cagggaagagga

SEQ ID NO: 722 - RNA, 15 nt, Artificial Sequence
  Description of Artificial Sequence: Synthetic oligonucleotide
augaucuuuuuuuug

SEQ ID NO: 723 - RNA, 11 nt, Artificial Sequence
  Description of Artificial Sequence: Synthetic oligonucleotide
aguucacggcc

SEQ ID NO: 724 - RNA, 13 nt, Artificial Sequence
  Description of Artificial Sequence: Synthetic oligonucleotide
caccaucacacca

SEQ ID NO: 725 - RNA, 11 nt, Artificial Sequence
  Description of Artificial Sequence: Synthetic oligonucleotide
ccugcggguuu

SEQ ID NO: 726 - RNA, 10 nt, Artificial Sequence
  Description of Artificial Sequence: Synthetic oligonucleotide
auccaguuug

SEQ ID NO: 727 - RNA, 13 nt, Artificial Sequence
  Description of Artificial Sequence: Synthetic oligonucleotide
guuaaggacuucu

SEQ ID NO: 728 - RNA, 13 nt, Artificial Sequence
  Description of Artificial Sequence: Synthetic oligonucleotide
cagugggacagag

SEQ ID NO: 729 - RNA, 14 nt, Artificial Sequence
  Description of Artificial Sequence: Synthetic oligonucleotide
aauuuguuauugug

SEQ ID NO: 730 - RNA, 13 nt, Artificial Sequence
  Description of Artificial Sequence: Synthetic oligonucleotide
uucaaaugcauuu

SEQ ID NO: 731 - RNA, 10 nt, Artificial Sequence
  Description of Artificial Sequence: Synthetic oligonucleotide
caggaaagcc

SEQ ID NO: 732 - RNA, 11 nt, Artificial Sequence
  Description of Artificial Sequence: Synthetic oligonucleotide
aggaaagcccu

SEQ ID NO: 733 - RNA, 12 nt, Artificial Sequence
  Description of Artificial Sequence: Synthetic oligonucleotide
cccagcauggcc

SEQ ID NO: 734 - RNA, 11 nt, Artificial Sequence
  Description of Artificial Sequence: Synthetic oligonucleotide
cuucucccuga

SEQ ID NO: 735 - RNA, 12 nt, Artificial Sequence
  Description of Artificial Sequence: Synthetic oligonucleotide
gaagaagcccuu

SEQ ID NO: 736 - RNA, 12 nt, Artificial Sequence
  Description of Artificial Sequence: Synthetic oligonucleotide
agaagcccuuca

SEQ ID NO: 737 - RNA, 11 nt, Artificial Sequence
  Description of Artificial Sequence: Synthetic oligonucleotide
gcccuucagcg

SEQ ID NO: 738 - RNA, 11 nt, Artificial Sequence
  Description of Artificial Sequence: Synthetic oligonucleotide
ccuucagcggc

SEQ ID NO: 739 - RNA, 12 nt, Artificial Sequence
  Description of Artificial Sequence: Synthetic oligonucleotide
ucagcggccagu

SEQ ID NO: 740 - RNA, 12 nt, Artificial Sequence
  Description of Artificial Sequence: Synthetic oligonucleotide
ugaaaagcuccg

SEQ ID NO: 741 - RNA, 11 nt, Artificial Sequence
  Description of Artificial Sequence: Synthetic oligonucleotide
aaaagcuccgg

SEQ ID NO: 742 - RNA, 13 nt, Artificial Sequence
  Description of Artificial Sequence: Synthetic oligonucleotide
agucaacagucug

SEQ ID NO: 743 - RNA, 13 nt, Artificial Sequence
  Description of Artificial Sequence: Synthetic oligonucleotide
cagaguucaaaag

SEQ ID NO: 744 - RNA, 13 nt, Artificial Sequence
  Description of Artificial Sequence: Synthetic oligonucleotide
agaguucaaaagc

SEQ ID NO: 745 - RNA, 12 nt, Artificial Sequence
  Description of Artificial Sequence: Synthetic oligonucleotide
uucaaaagcccu

SEQ ID NO: 746 - RNA, 12 nt, Artificial Sequence
  Description of Artificial Sequence: Synthetic oligonucleotide
ucaaaagcccuu

SEQ ID NO: 747 - RNA, 12 nt, Artificial Sequence
  Description of Artificial Sequence: Synthetic oligonucleotide
aaaagcccuuca

SEQ ID NO: 748 - RNA, 12 nt, Artificial Sequence
  Description of Artificial Sequence: Synthetic oligonucleotide
aaagcccuucag

SEQ ID NO: 749 - RNA, 13 nt, Artificial Sequence
  Description of Artificial Sequence: Synthetic oligonucleotide
gugaagccgcucg

SEQ ID NO: 750 - RNA, 12 nt, Artificial Sequence
  Description of Artificial Sequence: Synthetic oligonucleotide
cacgccagucaa

SEQ ID NO: 751 - RNA, 13 nt, Artificial Sequence
  Description of Artificial Sequence: Synthetic oligonucleotide
uucuuggugcgug

SEQ ID NO: 752 - RNA, 14 nt, Artificial Sequence
  Description of Artificial Sequence: Synthetic oligonucleotide
auuggauucaucag

SEQ ID NO: 753 - RNA, 13 nt, Artificial Sequence
  Description of Artificial Sequence: Synthetic oligonucleotide
uggaauaccuaag

SEQ ID NO: 754 - RNA, 12 nt, Artificial Sequence
  Description of Artificial Sequence: Synthetic oligonucleotide
auuugaggcuca

SEQ ID NO: 755 - RNA, 11 nt, Artificial Sequence
  Description of Artificial Sequence: Synthetic oligonucleotide
ucuacaauugg

SEQ ID NO: 756 - RNA, 12 nt, Artificial Sequence
  Description of Artificial Sequence: Synthetic oligonucleotide
uaguuaggagcc

SEQ ID NO: 757 - RNA, 13 nt, Artificial Sequence
  Description of Artificial Sequence: Synthetic oligonucleotide
agucaauauccac

SEQ ID NO: 758 - RNA, 13 nt, Artificial Sequence
  Description of Artificial Sequence: Synthetic oligonucleotide
auguucagucaca

SEQ ID NO: 759 - RNA, 12 nt, Artificial Sequence
  Description of Artificial Sequence: Synthetic oligonucleotide
acacacacauac

SEQ ID NO: 760 - RNA, 12 nt, Artificial Sequence
  Description of Artificial Sequence: Synthetic oligonucleotide
uuccuuuugcuu

SEQ ID NO: 761 - RNA, 16 nt, Artificial Sequence
  Description of Artificial Sequence: Synthetic oligonucleotide
uuuuaaaguaauuuuu

SEQ ID NO: 762 - RNA, 13 nt, Artificial Sequence
  Description of Artificial Sequence: Synthetic oligonucleotide
caacagucaaugg

SEQ ID NO: 763 - RNA, 13 nt, Artificial Sequence
  Description of Artificial Sequence: Synthetic oligonucleotide
ucgacaaaccaau

SEQ ID NO: 764 - RNA, 12 nt, Artificial Sequence
  Description of Artificial Sequence: Synthetic oligonucleotide
acugcuaccacu

SEQ ID NO: 765 - RNA, 13 nt, Artificial Sequence
  Description of Artificial Sequence: Synthetic oligonucleotide
gcaagcggucuua

SEQ ID NO: 766 - RNA, 13 nt, Artificial Sequence
  Description of Artificial Sequence: Synthetic oligonucleotide
ggucuuaccggcu

SEQ ID NO: 767 - RNA, 11 nt, Artificial Sequence
  Description of Artificial Sequence: Synthetic oligonucleotide
gauggguuacc

SEQ ID NO: 768 - RNA, 11 nt, Artificial Sequence
  Description of Artificial Sequence: Synthetic oligonucleotide
guuaccugcga

SEQ ID NO: 769 - RNA, 12 nt, Artificial Sequence
  Description of Artificial Sequence: Synthetic oligonucleotide
aaucuugcugag

SEQ ID NO: 770 - RNA, 13 nt, Artificial Sequence
  Description of Artificial Sequence: Synthetic oligonucleotide
agcauaaaacagu

SEQ ID NO: 771 - RNA, 12 nt, Artificial Sequence
  Description of Artificial Sequence: Synthetic oligonucleotide
guccuuuauccu

SEQ ID NO: 772 - RNA, 12 nt, Artificial Sequence
  Description of Artificial Sequence: Synthetic oligonucleotide
caacgcaaguug

SEQ ID NO: 773 - RNA, 13 nt, Artificial Sequence
  Description of Artificial Sequence: Synthetic oligonucleotide
aaacugaaaccau

SEQ ID NO: 774 - RNA, 14 nt, Artificial Sequence
  Description of Artificial Sequence: Synthetic oligonucleotide
acuuuguuaaauau

SEQ ID NO: 775 - RNA, 14 nt, Artificial Sequence
  Description of Artificial Sequence: Synthetic oligonucleotide
guauauuaaaaguu

SEQ ID NO: 776 - RNA, 13 nt, Artificial Sequence
  Description of Artificial Sequence: Synthetic oligonucleotide
guuuugacuuaac

SEQ ID NO: 777 - RNA, 13 nt, Artificial Sequence
  Description of Artificial Sequence: Synthetic oligonucleotide
gcaaacucagcac

SEQ ID NO: 778 - RNA, 11 nt, Artificial Sequence
  Description of Artificial Sequence: Synthetic oligonucleotide
ugcugaccuca

SEQ ID NO: 779 - RNA, 14 nt, Artificial Sequence
  Description of Artificial Sequence: Synthetic oligonucleotide
uuuauucagaucgc

SEQ ID NO: 780 - RNA, 13 nt, Artificial Sequence
  Description of Artificial Sequence: Synthetic oligonucleotide
aggguucugggau

SEQ ID NO: 781 - RNA, 15 nt, Artificial Sequence
  Description of Artificial Sequence: Synthetic oligonucleotide
auauuggaaauuaug

SEQ ID NO: 782 - RNA, 13 nt, Artificial Sequence
  Description of Artificial Sequence: Synthetic oligonucleotide
auggaagcacuag

SEQ ID NO: 783 - RNA, 13 nt, Artificial Sequence
  Description of Artificial Sequence: Synthetic oligonucleotide
guuuuuaugugga

SEQ ID NO: 784 - RNA, 12 nt, Artificial Sequence
  Description of Artificial Sequence: Synthetic oligonucleotide
ggaauugguaga

SEQ ID NO: 785 - RNA, 13 nt, Artificial Sequence
  Description of Artificial Sequence: Synthetic oligonucleotide
uuagacuuggaga

SEQ ID NO: 786 - RNA, 13 nt, Artificial Sequence
  Description of Artificial Sequence: Synthetic oligonucleotide
uuacaguauucca

SEQ ID NO: 787 - RNA, 15 nt, Artificial Sequence
  Description of Artificial Sequence: Synthetic oligonucleotide
ccacugaugaauuaa

SEQ ID NO: 788 - RNA, 12 nt, Artificial Sequence
  Description of Artificial Sequence: Synthetic oligonucleotide
ccacaucaucac

SEQ ID NO: 789 - RNA, 13 nt, Artificial Sequence
  Description of Artificial Sequence: Synthetic oligonucleotide
cucaccaaacaga

SEQ ID NO: 790 - RNA, 12 nt, Artificial Sequence
  Description of Artificial Sequence: Synthetic oligonucleotide
ggaacaugaugg

SEQ ID NO: 791 - RNA, 12 nt, Artificial Sequence
  Description of Artificial Sequence: Synthetic oligonucleotide
cauguagacugc

SEQ ID NO: 792 - RNA, 13 nt, Artificial Sequence
  Description of Artificial Sequence: Synthetic oligonucleotide
ggaucuauuuaug

SEQ ID NO: 793 - RNA, 12 nt, Artificial Sequence
  Description of Artificial Sequence: Synthetic oligonucleotide
gcacuauuauca

SEQ ID NO: 794 - RNA, 11 nt, Artificial Sequence
  Description of Artificial Sequence: Synthetic oligonucleotide
aucaguucugc

SEQ ID NO: 795 - RNA, 13 nt, Artificial Sequence
  Description of Artificial Sequence: Synthetic oligonucleotide
agauuaaaccuac

SEQ ID NO: 796 - RNA, 13 nt, Artificial Sequence
  Description of Artificial Sequence: Synthetic oligonucleotide
auaaaauccuucu

SEQ ID NO: 797 - RNA, 12 nt, Artificial Sequence
  Description of Artificial Sequence: Synthetic oligonucleotide
aaugcuguagac

SEQ ID NO: 798 - RNA, 13 nt, Artificial Sequence
  Description of Artificial Sequence: Synthetic oligonucleotide
uugauaggaauag

SEQ ID NO: 799 - RNA, 11 nt, Artificial Sequence
  Description of Artificial Sequence: Synthetic oligonucleotide
aauggcccuga

SEQ ID NO: 800 - RNA, 11 nt, Artificial Sequence
  Description of Artificial Sequence: Synthetic oligonucleotide
uuccucaagca

SEQ ID NO: 801 - RNA, 10 nt, Artificial Sequence
  Description of Artificial Sequence: Synthetic oligonucleotide
guucagccca

SEQ ID NO: 802 - RNA, 11 nt, Artificial Sequence
  Description of Artificial Sequence: Synthetic oligonucleotide
gcugcugaacc

SEQ ID NO: 803 - RNA, 12 nt, Artificial Sequence
  Description of Artificial Sequence: Synthetic oligonucleotide
aaguucucuuca

SEQ ID NO: 804 - RNA, 11 nt, Artificial Sequence
  Description of Artificial Sequence: Synthetic oligonucleotide
ccagccuagag

SEQ ID NO: 805 - RNA, 13 nt, Artificial Sequence
  Description of Artificial Sequence: Synthetic oligonucleotide
cucugugaagugu

SEQ ID NO: 806 - RNA, 14 nt, Artificial Sequence
  Description of Artificial Sequence: Synthetic oligonucleotide
ugagaaaauuucaa

SEQ ID NO: 807 - RNA, 11 nt, Artificial Sequence
  Description of Artificial Sequence: Synthetic oligonucleotide
aauccuccuga

SEQ ID NO: 808 - RNA, 12 nt, Artificial Sequence
  Description of Artificial Sequence: Synthetic oligonucleotide
gugacaucauau

SEQ ID NO: 809 - RNA, 13 nt, Artificial Sequence
  Description of Artificial Sequence: Synthetic oligonucleotide
aaucuucaucaua

SEQ ID NO: 810 - RNA, 13 nt, Artificial Sequence
  Description of Artificial Sequence: Synthetic oligonucleotide
gacuagcuauuaa

SEQ ID NO: 811 - RNA, 14 nt, Artificial Sequence
  Description of Artificial Sequence: Synthetic oligonucleotide
ucucuacuaaaaau

SEQ ID NO: 812 - RNA, 12 nt, Artificial Sequence
  Description of Artificial Sequence: Synthetic oligonucleotide
ucuaucucgccu

SEQ ID NO: 813 - RNA, 13 nt, Artificial Sequence
  Description of Artificial Sequence: Synthetic oligonucleotide
cuucgguccaguu

SEQ ID NO: 814 - RNA, 11 nt, Artificial Sequence
  Description of Artificial Sequence: Synthetic oligonucleotide
gauguagccgc

SEQ ID NO: 815 - RNA, 12 nt, Artificial Sequence
  Description of Artificial Sequence: Synthetic oligonucleotide
ugaggagacuug

SEQ ID NO: 816 - RNA, 12 nt, Artificial Sequence
  Description of Artificial Sequence: Synthetic oligonucleotide
gaguagugagga

SEQ ID NO: 817 - RNA, 14 nt, Artificial Sequence
  Description of Artificial Sequence: Synthetic oligonucleotide
cagaugaguacaaa

SEQ ID NO: 818 - RNA, 13 nt, Artificial Sequence
  Description of Artificial Sequence: Synthetic oligonucleotide
guuguuaaugggc

SEQ ID NO: 819 - RNA, 13 nt, Artificial Sequence
  Description of Artificial Sequence: Synthetic oligonucleotide
uuuuuaauuuauu

SEQ ID NO: 820 - RNA, 12 nt, Artificial Sequence
  Description of Artificial Sequence: Synthetic oligonucleotide
uauuuaaauaug

SEQ ID NO: 821 - RNA, 13 nt, Artificial Sequence
  Description of Artificial Sequence: Synthetic oligonucleotide
uauccuuuguuuc

SEQ ID NO: 822 - RNA, 14 nt, Artificial Sequence
  Description of Artificial Sequence: Synthetic oligonucleotide
cgucuaaguguuug

SEQ ID NO: 823 - RNA, 12 nt, Artificial Sequence
  Description of Artificial Sequence: Synthetic oligonucleotide
accugugacaaa

SEQ ID NO: 824 - RNA, 13 nt, Artificial Sequence
  Description of Artificial Sequence: Synthetic oligonucleotide
ccaggcugaauua

SEQ ID NO: 825 - RNA, 14 nt, Artificial Sequence
  Description of Artificial Sequence: Synthetic oligonucleotide
gucauucuuacaau

SEQ ID NO: 826 - RNA, 15 nt, Artificial Sequence
  Description of Artificial Sequence: Synthetic oligonucleotide
ucauucuuacaauug

SEQ ID NO: 827 - RNA, 12 nt, Artificial Sequence
  Description of Artificial Sequence: Synthetic oligonucleotide
cagagaguguac

SEQ ID NO: 828 - RNA, 12 nt, Artificial Sequence
  Description of Artificial Sequence: Synthetic oligonucleotide
agaacucagcag

SEQ ID NO: 829 - RNA, 13 nt, Artificial Sequence
  Description of Artificial Sequence: Synthetic oligonucleotide
uuuauuuucagua

SEQ ID NO: 830 - RNA, 12 nt, Artificial Sequence
  Description of Artificial Sequence: Synthetic oligonucleotide
ucuuaaauggaa

SEQ ID NO: 831 - RNA, 13 nt, Artificial Sequence
  Description of Artificial Sequence: Synthetic oligonucleotide
ugccuaaaauugu

SEQ ID NO: 832 - RNA, 12 nt, Artificial Sequence
  Description of Artificial Sequence: Synthetic oligonucleotide
agacugugagcu

SEQ ID NO: 833 - RNA, 14 nt, Artificial Sequence
  Description of Artificial Sequence: Synthetic oligonucleotide
ugcuuuuuauuaau

SEQ ID NO: 834 - RNA, 13 nt, Artificial Sequence
  Description of Artificial Sequence: Synthetic oligonucleotide
cucuucuuacauu

SEQ ID NO: 835 - RNA, 15 nt, Artificial Sequence
  Description of Artificial Sequence: Synthetic oligonucleotide
cauuuguaaaaaugu

SEQ ID NO: 836 - RNA, 15 nt, Artificial Sequence
  Description of Artificial Sequence: Synthetic oligonucleotide
aucuuaauucauauu

SEQ ID NO: 837 - RNA, 13 nt, Artificial Sequence
  Description of Artificial Sequence: Synthetic oligonucleotide
gaacuaaucauga

SEQ ID NO: 838 - RNA, 12 nt, Artificial Sequence
  Description of Artificial Sequence: Synthetic oligonucleotide
ucugcucuuggg

SEQ ID NO: 839 - RNA, 13 nt, Artificial Sequence
  Description of Artificial Sequence: Synthetic oligonucleotide
caguagcuuugag

SEQ ID NO: 840 - RNA, 14 nt, Artificial Sequence
  Description of Artificial Sequence: Synthetic oligonucleotide
cacguaauauuuca

SEQ ID NO: 841 - RNA, 13 nt, Artificial Sequence
  Description of Artificial Sequence: Synthetic oligonucleotide
uauucucuucacu

SEQ ID NO: 842 - RNA, 14 nt, Artificial Sequence
  Description of Artificial Sequence: Synthetic oligonucleotide
cuaaugcuaagaaa

SEQ ID NO: 843 - RNA, 12 nt, Artificial Sequence
  Description of Artificial Sequence: Synthetic oligonucleotide
gcugaaaaucaa

SEQ ID NO: 844 - RNA, 14 nt, Artificial Sequence
  Description of Artificial Sequence: Synthetic oligonucleotide
aauaugauuacuuu

SEQ ID NO: 845 - RNA, 14 nt, Artificial Sequence
  Description of Artificial Sequence: Synthetic oligonucleotide
cauuuuguucuaca

SEQ ID NO: 846 - RNA, 12 nt, Artificial Sequence
  Description of Artificial Sequence: Synthetic oligonucleotide
cccgggacucuc

SEQ ID NO: 847 - RNA, 14 nt, Artificial Sequence
  Description of Artificial Sequence: Synthetic oligonucleotide
ccuuuaaaguaaag

SEQ ID NO: 848 - RNA, 13 nt, Artificial Sequence
  Description of Artificial Sequence: Synthetic oligonucleotide
ucuggaagccugg

SEQ ID NO: 849 - RNA, 14 nt, Artificial Sequence
  Description of Artificial Sequence: Synthetic oligonucleotide
aaaacaaaagagag

SEQ ID NO: 850 - RNA, 13 nt, Artificial Sequence
  Description of Artificial Sequence: Synthetic oligonucleotide
aucaguuaugccg

SEQ ID NO: 851 - RNA, 13 nt, Artificial Sequence
  Description of Artificial Sequence: Synthetic oligonucleotide
uaaaagaagucca

SEQ ID NO: 852 - RNA, 11 nt, Artificial Sequence
  Description of Artificial Sequence: Synthetic oligonucleotide
aggugagguua

SEQ ID NO: 853 - RNA, 11 nt, Artificial Sequence
  Description of Artificial Sequence: Synthetic oligonucleotide
gggaagaggac

SEQ ID NO: 854 - RNA, 13 nt, Artificial Sequence
  Description of Artificial Sequence: Synthetic oligonucleotide
aagcaaguauugu

SEQ ID NO: 855 - RNA, 12 nt, Artificial Sequence
  Description of Artificial Sequence: Synthetic oligonucleotide
auuguagcacuc

SEQ ID NO: 856 - RNA, 14 nt, Artificial Sequence
  Description of Artificial Sequence: Synthetic oligonucleotide
acaaaaccacaaau

SEQ ID NO: 857 - RNA, 12 nt, Artificial Sequence
  Description of Artificial Sequence: Synthetic oligonucleotide
uaagcccauaca

SEQ ID NO: 858 - RNA, 11 nt, Artificial Sequence
  Description of Artificial Sequence: Synthetic oligonucleotide
agcccauacag

SEQ ID NO: 859 - RNA, 12 nt, Artificial Sequence
  Description of Artificial Sequence: Synthetic oligonucleotide
cagaaaccuucc

SEQ ID NO: 860 - RNA, 10 nt, Artificial Sequence
  Description of Artificial Sequence: Synthetic oligonucleotide
guauaccuac

SEQ ID NO: 861 - RNA, 13 nt, Artificial Sequence
  Description of Artificial Sequence: Synthetic oligonucleotide
gccaguuuucgga

SEQ ID NO: 862 - RNA, 9 nt, Artificial Sequence
  Description of Artificial Sequence: Synthetic oligonucleotide
ggaacaggg

SEQ ID NO: 863 - RNA, 13 nt, Artificial Sequence
  Description of Artificial Sequence: Synthetic oligonucleotide
uuaacuuuccagu

SEQ ID NO: 864 - RNA, 14 nt, Artificial Sequence
  Description of Artificial Sequence: Synthetic oligonucleotide
aaaguuugguuuug

SEQ ID NO: 865 - RNA, 12 nt, Artificial Sequence
  Description of Artificial Sequence: Synthetic oligonucleotide
cuucccacugua

SEQ ID NO: 866 - RNA, 13 nt, Artificial Sequence
  Description of Artificial Sequence: Synthetic oligonucleotide
ugauaccauauga

SEQ ID NO: 867 - RNA, 11 nt, Artificial Sequence
  Description of Artificial Sequence: Synthetic oligonucleotide
aacaugggcug

SEQ ID NO: 868 - RNA, 13 nt, Artificial Sequence
  Description of Artificial Sequence: Synthetic oligonucleotide
caacuuuuucaua

SEQ ID NO: 869 - RNA, 12 nt, Artificial Sequence
  Description of Artificial Sequence: Synthetic oligonucleotide
caugaggccgga

SEQ ID NO: 870 - RNA, 11 nt, Artificial Sequence
  Description of Artificial Sequence: Synthetic oligonucleotide
acugcauuugu

SEQ ID NO: 871 - RNA, 13 nt, Artificial Sequence
  Description of Artificial Sequence: Synthetic oligonucleotide
aauguuuacuacc

SEQ ID NO: 872 - RNA, 15 nt, Artificial Sequence
  Description of Artificial Sequence: Synthetic oligonucleotide
aauuuuuugaugaaa

SEQ ID NO: 873 - RNA, 14 nt, Artificial Sequence
  Description of Artificial Sequence: Synthetic oligonucleotide
cagugugugaauuu

SEQ ID NO: 874 - RNA, 13 nt, Artificial Sequence
  Description of Artificial Sequence: Synthetic oligonucleotide
gagcaauguaugu

SEQ ID NO: 875 - RNA, 14 nt, Artificial Sequence
  Description of Artificial Sequence: Synthetic oligonucleotide
aaagcacauauaua

SEQ ID NO: 876 - RNA, 14 nt, Artificial Sequence
  Description of Artificial Sequence: Synthetic oligonucleotide
guaauaguuucucc

SEQ ID NO: 877 - RNA, 13 nt, Artificial Sequence
  Description of Artificial Sequence: Synthetic oligonucleotide
aguuucuccaaau

SEQ ID NO: 878 - RNA, 13 nt, Artificial Sequence
  Description of Artificial Sequence: Synthetic oligonucleotide
uacuuccuagaaa

SEQ ID NO: 879 - RNA, 13 nt, Artificial Sequence
  Description of Artificial Sequence: Synthetic oligonucleotide
uacaccauauaug

SEQ ID NO: 880 - RNA, 14 nt, Artificial Sequence
  Description of Artificial Sequence: Synthetic oligonucleotide
auauaugaauggag

SEQ ID NO: 881 - RNA, 13 nt, Artificial Sequence
  Description of Artificial Sequence: Synthetic oligonucleotide
acgagaagaagau

SEQ ID NO: 882 - RNA, 13 nt, Artificial Sequence
  Description of Artificial Sequence: Synthetic oligonucleotide
ucauuuacaggga

SEQ ID NO: 883 - RNA, 13 nt, Artificial Sequence
  Description of Artificial Sequence: Synthetic oligonucleotide
cauuuacagggac

SEQ ID NO: 884 - RNA, 10 nt, Artificial Sequence
  Description of Artificial Sequence: Synthetic oligonucleotide
agggaccuga

SEQ ID NO: 885 - RNA, 14 nt, Artificial Sequence
  Description of Artificial Sequence: Synthetic oligonucleotide
uguuugacugcauc

SEQ ID NO: 886 - RNA, 13 nt, Artificial Sequence
  Description of Artificial Sequence: Synthetic oligonucleotide
uuugacugcaucg

SEQ ID NO: 887 - RNA, 12 nt, Artificial Sequence
  Description of Artificial Sequence: Synthetic oligonucleotide
gaguucacaggg

SEQ ID NO: 888 - RNA, 13 nt, Artificial Sequence
  Description of Artificial Sequence: Synthetic oligonucleotide
ggcaccucugucc

SEQ ID NO: 889 - RNA, 15 nt, Artificial Sequence
  Description of Artificial Sequence: Synthetic oligonucleotide
gguuugucuuuuuaa

SEQ ID NO: 890 - RNA, 14 nt, Artificial Sequence
  Description of Artificial Sequence: Synthetic oligonucleotide
uuugucuuuuuaag

SEQ ID NO: 891 - RNA, 13 nt, Artificial Sequence
  Description of Artificial Sequence: Synthetic oligonucleotide
ccuaaagguuguc

SEQ ID NO: 892 - RNA, 12 nt, Artificial Sequence
  Description of Artificial Sequence: Synthetic oligonucleotide
aagguugucgac

SEQ ID NO: 893 - RNA, 13 nt, Artificial Sequence
  Description of Artificial Sequence: Synthetic oligonucleotide
accuggcaauugu

SEQ ID NO: 894 - RNA, 12 nt, Artificial Sequence
  Description of Artificial Sequence: Synthetic oligonucleotide
aguggugcgagg

SEQ ID NO: 895 - RNA, 13 nt, Artificial Sequence
  Description of Artificial Sequence: Synthetic oligonucleotide
agagacaugaaau

SEQ ID NO: 896 - RNA, 13 nt, Artificial Sequence
  Description of Artificial Sequence: Synthetic oligonucleotide
auauauuucucca

SEQ ID NO: 897 - RNA, 10 nt, Artificial Sequence
  Description of Artificial Sequence: Synthetic oligonucleotide
caugaaggcu

SEQ ID NO: 898 - RNA, 11 nt, Artificial Sequence
  Description of Artificial Sequence: Synthetic oligonucleotide
gcuggaguggu

SEQ ID NO: 899 - RNA, 11 nt, Artificial Sequence
  Description of Artificial Sequence: Synthetic oligonucleotide
aggaagagagg

SEQ ID NO: 900 - RNA, 12 nt, Artificial Sequence
  Description of Artificial Sequence: Synthetic oligonucleotide
cuugcaucgggc

SEQ ID NO: 901 - RNA, 13 nt, Artificial Sequence
  Description of Artificial Sequence: Synthetic oligonucleotide
auauccuacugug

SEQ ID NO: 902 - RNA, 13 nt, Artificial Sequence
  Description of Artificial Sequence: Synthetic oligonucleotide
uccuacuguguaa

SEQ ID NO: 903 - RNA, 12 nt, Artificial Sequence
  Description of Artificial Sequence: Synthetic oligonucleotide
ccuuguagugua

SEQ ID NO: 904 - RNA, 13 nt, Artificial Sequence
  Description of Artificial Sequence: Synthetic oligonucleotide
ucuuuguugauug

SEQ ID NO: 905 - RNA, 14 nt, Artificial Sequence
  Description of Artificial Sequence: Synthetic oligonucleotide
uuuguugauugaaa

SEQ ID NO: 906 - RNA, 15 nt, Artificial Sequence
  Description of Artificial Sequence: Synthetic oligonucleotide
uucuuuuucuuccau

SEQ ID NO: 907 - RNA, 13 nt, Artificial Sequence
  Description of Artificial Sequence: Synthetic oligonucleotide
aaucuuccuucua

SEQ ID NO: 908 - RNA, 13 nt, Artificial Sequence
  Description of Artificial Sequence: Synthetic oligonucleotide
uugaaugcuucau

SEQ ID NO: 909 - RNA, 13 nt, Artificial Sequence
  Description of Artificial Sequence: Synthetic oligonucleotide
ugaaugcuucaug

SEQ ID NO: 910 - RNA, 13 nt, Artificial Sequence
  Description of Artificial Sequence: Synthetic oligonucleotide
aauucuacuuuga

SEQ ID NO: 911 - RNA, 13 nt, Artificial Sequence
  Description of Artificial Sequence: Synthetic oligonucleotide
agcaacuacagac

SEQ ID NO: 912 - RNA, 13 nt, Artificial Sequence
  Description of Artificial Sequence: Synthetic oligonucleotide
gaccaaggucaac

SEQ ID NO: 913 - RNA, 13 nt, Artificial Sequence
  Description of Artificial Sequence: Synthetic oligonucleotide
cgacuaucucgac

SEQ ID NO: 914 - RNA, 13 nt, Artificial Sequence
  Description of Artificial Sequence: Synthetic oligonucleotide
aaccuucccaaac

SEQ ID NO: 915 - RNA, 14 nt, Artificial Sequence
  Description of Artificial Sequence: Synthetic oligonucleotide
ccaagcuuagaacu

SEQ ID NO: 916 - RNA, 15 nt, Artificial Sequence
  Description of Artificial Sequence: Synthetic oligonucleotide
agcuuagaacuuuaa

SEQ ID NO: 917 - RNA, 11 nt, Artificial Sequence
  Description of Artificial Sequence: Synthetic oligonucleotide
aagaccaccac

SEQ ID NO: 918 - RNA, 14 nt, Artificial Sequence
  Description of Artificial Sequence: Synthetic oligonucleotide
gcgagaaauaaagu

SEQ ID NO: 919 - RNA, 14 nt, Artificial Sequence
  Description of Artificial Sequence: Synthetic oligonucleotide
cgagaaauaaaguu

SEQ ID NO: 920 - RNA, 12 nt, Artificial Sequence
  Description of Artificial Sequence: Synthetic oligonucleotide
aggaaaugaucc

SEQ ID NO: 921 - RNA, 13 nt, Artificial Sequence
  Description of Artificial Sequence: Synthetic oligonucleotide
gaagaaaugaaac

SEQ ID NO: 922 - RNA, 13 nt, Artificial Sequence
  Description of Artificial Sequence: Synthetic oligonucleotide
guuuccauccucc

SEQ ID NO: 923 - RNA, 15 nt, Artificial Sequence
  Description of Artificial Sequence: Synthetic oligonucleotide
acugaaaaucuuuga

SEQ ID NO: 924 - RNA, 11 nt, Artificial Sequence
  Description of Artificial Sequence: Synthetic oligonucleotide
ugccguucagg

SEQ ID NO: 925 - RNA, 13 nt, Artificial Sequence
  Description of Artificial Sequence: Synthetic oligonucleotide
caggguccagaag

SEQ ID NO: 926 - RNA, 13 nt, Artificial Sequence
  Description of Artificial Sequence: Synthetic oligonucleotide
ucaagacugcuug

SEQ ID NO: 927 - RNA, 13 nt, Artificial Sequence
  Description of Artificial Sequence: Synthetic oligonucleotide
uccaugucuuugg

SEQ ID NO: 928 - RNA, 11 nt, Artificial Sequence
  Description of Artificial Sequence: Synthetic oligonucleotide
gccugaaacac

SEQ ID NO: 929 - RNA, 12 nt, Artificial Sequence
  Description of Artificial Sequence: Synthetic oligonucleotide
ucucuguaccuc

SEQ ID NO: 930 - RNA, 12 nt, Artificial Sequence
  Description of Artificial Sequence: Synthetic oligonucleotide
agcaagacaaga

SEQ ID NO: 931 - RNA, 13 nt, Artificial Sequence
  Description of Artificial Sequence: Synthetic oligonucleotide
gcaagacaagaaa

SEQ ID NO: 932 - RNA, 12 nt, Artificial Sequence
  Description of Artificial Sequence: Synthetic oligonucleotide
uguacaagaucc

SEQ ID NO: 933 - RNA, 12 nt, Artificial Sequence
  Description of Artificial Sequence: Synthetic oligonucleotide
cguacuugcaga

SEQ ID NO: 934 - RNA, 13 nt, Artificial Sequence
  Description of Artificial Sequence: Synthetic oligonucleotide
cgaucgauacaga

SEQ ID NO: 935 - RNA, 13 nt, Artificial Sequence
  Description of Artificial Sequence: Synthetic oligonucleotide
uauaaaaauaaau

SEQ ID NO: 936 - RNA, 13 nt, Artificial Sequence
  Description of Artificial Sequence: Synthetic oligonucleotide
uaaaaauaaauau

SEQ ID NO: 937 - RNA, 13 nt, Artificial Sequence
  Description of Artificial Sequence: Synthetic oligonucleotide
uuugacugcugug

SEQ ID NO: 938 - RNA, 13 nt, Artificial Sequence
  Description of Artificial Sequence: Synthetic oligonucleotide
ggagaugagagac

SEQ ID NO: 939 - RNA, 10 nt, Artificial Sequence
  Description of Artificial Sequence: Synthetic oligonucleotide
ucccacuugg

SEQ ID NO: 940 - RNA, 10 nt, Artificial Sequence
  Description of Artificial Sequence: Synthetic oligonucleotide
guucacggcc

SEQ ID NO: 941 - RNA, 12 nt, Artificial Sequence
  Description of Artificial Sequence: Synthetic oligonucleotide
accaucacacca

SEQ ID NO: 942 - RNA, 10 nt, Artificial Sequence
  Description of Artificial Sequence: Synthetic oligonucleotide
cugcggguuu

SEQ ID NO: 943 - RNA, 9 nt, Artificial Sequence
  Description of Artificial Sequence: Synthetic oligonucleotide
uccaguuug

SEQ ID NO: 944 - RNA, 12 nt, Artificial Sequence
  Description of Artificial Sequence: Synthetic oligonucleotide
uuaaggacuucu

SEQ ID NO: 945 - RNA, 12 nt, Artificial Sequence
  Description of Artificial Sequence: Synthetic oligonucleotide
agugggacagag

SEQ ID NO: 946 - RNA, 13 nt, Artificial Sequence
  Description of Artificial Sequence: Synthetic oligonucleotide
auuuguuauugug

SEQ ID NO: 947 - RNA, 12 nt, Artificial Sequence
  Description of Artificial Sequence: Synthetic oligonucleotide
ucaaaugcauuu

SEQ ID NO: 948 - RNA, 9 nt, Artificial Sequence
  Description of Artificial Sequence: Synthetic oligonucleotide
aggaaagcc

SEQ ID NO: 949 - RNA, 10 nt, Artificial Sequence
  Description of Artificial Sequence: Synthetic oligonucleotide
ggaaagcccu

SEQ ID NO: 950 - RNA, 11 nt, Artificial Sequence
  Description of Artificial Sequence: Synthetic oligonucleotide
ccagcauggcc

SEQ ID NO: 951 - RNA, 10 nt, Artificial Sequence
  Description of Artificial Sequence: Synthetic oligonucleotide
uucucccuga

SEQ ID NO: 952 - RNA, 11 nt, Artificial Sequence
  Description of Artificial Sequence: Synthetic oligonucleotide
aagaagcccuu

SEQ ID NO: 953 - RNA, 11 nt, Artificial Sequence
  Description of Artificial Sequence: Synthetic oligonucleotide
gaagcccuuca

SEQ ID NO: 954 - RNA, 10 nt, Artificial Sequence
  Description of Artificial Sequence: Synthetic oligonucleotide
cccuucagcg

SEQ ID NO: 955 - RNA, 10 nt, Artificial Sequence
  Description of Artificial Sequence: Synthetic oligonucleotide
cuucagcggc

SEQ ID NO: 956 - RNA, 11 nt, Artificial Sequence
  Description of Artificial Sequence: Synthetic oligonucleotide
cagcggccagu

SEQ ID NO: 957 - RNA, 11 nt, Artificial Sequence
  Description of Artificial Sequence: Synthetic oligonucleotide
gaaaagcuccg

SEQ ID NO: 958 - RNA, 10 nt, Artificial Sequence
  Description of Artificial Sequence: Synthetic oligonucleotide
aaagcuccgg

SEQ ID NO: 959 - RNA, 12 nt, Artificial Sequence
  Description of Artificial Sequence: Synthetic oligonucleotide
gucaacagucug

SEQ ID NO: 960 - RNA, 12 nt, Artificial Sequence
  Description of Artificial Sequence: Synthetic oligonucleotide
agaguucaaaag

SEQ ID NO: 961 - RNA, 12 nt, Artificial Sequence
  Description of Artificial Sequence: Synthetic oligonucleotide
gaguucaaaagc

SEQ ID NO: 962 - RNA, 11 nt, Artificial Sequence
  Description of Artificial Sequence: Synthetic oligonucleotide
ucaaaagcccu

SEQ ID NO: 963 - RNA, 11 nt, Artificial Sequence
  Description of Artificial Sequence: Synthetic oligonucleotide
caaaagcccuu

SEQ ID NO: 964 - RNA, 11 nt, Artificial Sequence
  Description of Artificial Sequence: Synthetic oligonucleotide
aaagcccuuca

SEQ ID NO: 965 - RNA, 11 nt, Artificial Sequence
  Description of Artificial Sequence: Synthetic oligonucleotide
aagcccuucag

SEQ ID NO: 966 - RNA, 12 nt, Artificial Sequence
  Description of Artificial Sequence: Synthetic oligonucleotide
ugaagccgcucg

SEQ ID NO: 967 - RNA, 11 nt, Artificial Sequence
  Description of Artificial Sequence: Synthetic oligonucleotide
acgccagucaa

SEQ ID NO: 968 - RNA, 12 nt, Artificial Sequence
  Description of Artificial Sequence: Synthetic oligonucleotide
ucuuggugcgug

SEQ ID NO: 969 - RNA, 13 nt, Artificial Sequence
  Description of Artificial Sequence: Synthetic oligonucleotide
uuggauucaucag

SEQ ID NO: 970 - RNA, 12 nt, Artificial Sequence
  Description of Artificial Sequence: Synthetic oligonucleotide
ggaauaccuaag

SEQ ID NO: 971 - RNA, 11 nt, Artificial Sequence
  Description of Artificial Sequence: Synthetic oligonucleotide
uuugaggcuca

SEQ ID NO: 972 - RNA, 10 nt, Artificial Sequence
  Description of Artificial Sequence: Synthetic oligonucleotide
cuacaauugg

SEQ ID NO: 973 - RNA, 11 nt, Artificial Sequence
  Description of Artificial Sequence: Synthetic oligonucleotide
aguuaggagcc

SEQ ID NO: 974 - RNA, 12 nt, Artificial Sequence
  Description of Artificial Sequence: Synthetic oligonucleotide
gucaauauccac

SEQ ID NO: 975 - RNA, 12 nt, Artificial Sequence
  Description of Artificial Sequence: Synthetic oligonucleotide
uguucagucaca

SEQ ID NO: 976 - RNA, 11 nt, Artificial Sequence
  Description of Artificial Sequence: Synthetic oligonucleotide
cacacacauac

SEQ ID NO: 977 - RNA, 11 nt, Artificial Sequence
  Description of Artificial Sequence: Synthetic oligonucleotide
uccuuuugcuu

SEQ ID NO: 978 - RNA, 15 nt, Artificial Sequence
  Description of Artificial Sequence: Synthetic oligonucleotide
uuuaaaguaauuuuu

SEQ ID NO: 979 - RNA, 12 nt, Artificial Sequence
  Description of Artificial Sequence: Synthetic oligonucleotide
aacagucaaugg

SEQ ID NO: 980 - RNA, 12 nt, Artificial Sequence
  Description of Artificial Sequence: Synthetic oligonucleotide
cgacaaaccaau

SEQ ID NO: 981 - RNA, 11 nt, Artificial Sequence
  Description of Artificial Sequence: Synthetic oligonucleotide
cugcuaccacu

SEQ ID NO: 982 - RNA, 12 nt, Artificial Sequence
  Description of Artificial Sequence: Synthetic oligonucleotide
caagcggucuua

SEQ ID NO: 983 - RNA, 12 nt, Artificial Sequence
  Description of Artificial Sequence: Synthetic oligonucleotide
gucuuaccggcu

SEQ ID NO: 984 - RNA, 10 nt, Artificial Sequence
  Description of Artificial Sequence: Synthetic oligonucleotide
auggguuacc

SEQ ID NO: 985 - RNA, 10 nt, Artificial Sequence
  Description of Artificial Sequence: Synthetic oligonucleotide
uuaccugcga

SEQ ID NO: 986 - RNA, 11 nt, Artificial Sequence
  Description of Artificial Sequence: Synthetic oligonucleotide
aucuugcugag

SEQ ID NO: 987 - RNA, 12 nt, Artificial Sequence
  Description of Artificial Sequence: Synthetic oligonucleotide
gcauaaaacagu

SEQ ID NO: 988 - RNA, 11 nt, Artificial Sequence
  Description of Artificial Sequence: Synthetic oligonucleotide
uccuuuauccu

SEQ ID NO: 989 - RNA, 11 nt, Artificial Sequence
  Description of Artificial Sequence: Synthetic oligonucleotide
aacgcaaguug

SEQ ID NO: 990 - RNA, 12 nt, Artificial Sequence
  Description of Artificial Sequence: Synthetic oligonucleotide
aacugaaaccau

SEQ ID NO: 991 - RNA, 13 nt, Artificial Sequence
  Description of Artificial Sequence: Synthetic oligonucleotide
cuuuguuaaauau

SEQ ID NO: 992 - RNA, 13 nt, Artificial Sequence
  Description of Artificial Sequence: Synthetic oligonucleotide
uauauuaaaaguu

SEQ ID NO: 993 - RNA, 12 nt, Artificial Sequence
  Description of Artificial Sequence: Synthetic oligonucleotide
uuuugacuuaac

SEQ ID NO: 994 - RNA, 12 nt, Artificial Sequence
  Description of Artificial Sequence: Synthetic oligonucleotide
caaacucagcac

SEQ ID NO: 995 - RNA, 10 nt, Artificial Sequence
  Description of Artificial Sequence: Synthetic oligonucleotide
gcugaccuca

SEQ ID NO: 996 - RNA, 13 nt, Artificial Sequence
  Description of Artificial Sequence: Synthetic oligonucleotide
uuauucagaucgc

SEQ ID NO: 997 - RNA, 12 nt, Artificial Sequence
  Description of Artificial Sequence: Synthetic oligonucleotide
ggguucugggau

SEQ ID NO: 998 - RNA, 14 nt, Artificial Sequence
  Description of Artificial Sequence: Synthetic oligonucleotide
uauuggaaauuaug

SEQ ID NO: 999 - RNA, 12 nt, Artificial Sequence
  Description of Artificial Sequence: Synthetic oligonucleotide
uggaagcacuag

SEQ ID NO: 1000 - RNA, 12 nt, Artificial Sequence
  Description of Artificial Sequence: Synthetic oligonucleotide
uuuuuaugugga

SEQ ID NO: 1001 - RNA, 11 nt, Artificial Sequence
  Description of Artificial Sequence: Synthetic oligonucleotide
gaauugguaga

SEQ ID NO: 1002 - RNA, 12 nt, Artificial Sequence
  Description of Artificial Sequence: Synthetic oligonucleotide
uagacuuggaga

SEQ ID NO: 1003 - RNA, 12 nt, Artificial Sequence
  Description of Artificial Sequence: Synthetic oligonucleotide
uacaguauucca

SEQ ID NO: 1004 - RNA, 14 nt, Artificial Sequence
  Description of Artificial Sequence: Synthetic oligonucleotide
cacugaugaauuaa

SEQ ID NO: 1005 - RNA, 11 nt, Artificial Sequence
  Description of Artificial Sequence: Synthetic oligonucleotide
cacaucaucac

SEQ ID NO: 1006 - RNA, 12 nt, Artificial Sequence
  Description of Artificial Sequence: Synthetic oligonucleotide
ucaccaaacaga

SEQ ID NO: 1007 - RNA, 11 nt, Artificial Sequence
  Description of Artificial Sequence: Synthetic oligonucleotide
gaacaugaugg

SEQ ID NO: 1008 - RNA, 11 nt, Artificial Sequence
  Description of Artificial Sequence: Synthetic oligonucleotide
auguagacugc

SEQ ID NO: 1009 - RNA, 12 nt, Artificial Sequence
  Description of Artificial Sequence: Synthetic oligonucleotide
gaucuauuuaug

SEQ ID NO: 1010 - RNA, 11 nt, Artificial Sequence
  Description of Artificial Sequence: Synthetic oligonucleotide
cacuauuauca

SEQ ID NO: 1011 - RNA, 10 nt, Artificial Sequence
  Description of Artificial Sequence: Synthetic oligonucleotide
ucaguucugc

SEQ ID NO: 1012 - RNA, 12 nt, Artificial Sequence
  Description of Artificial Sequence: Synthetic oligonucleotide
gauuaaaccuac

SEQ ID NO: 1013 - RNA, 12 nt, Artificial Sequence
  Description of Artificial Sequence: Synthetic oligonucleotide
uaaaauccuucu

SEQ ID NO: 1014 - RNA, 11 nt, Artificial Sequence
  Description of Artificial Sequence: Synthetic oligonucleotide
augcuguagac

SEQ ID NO: 1015 - RNA, 12 nt, Artificial Sequence
  Description of Artificial Sequence: Synthetic oligonucleotide
ugauaggaauag

SEQ ID NO: 1016 - RNA, 10 nt, Artificial Sequence
  Description of Artificial Sequence: Synthetic oligonucleotide
auggcccuga

SEQ ID NO: 1017 - RNA, 10 nt, Artificial Sequence
  Description of Artificial Sequence: Synthetic oligonucleotide
uccucaagca

SEQ ID NO: 1018 - RNA, 9 nt, Artificial Sequence
  Description of Artificial Sequence: Synthetic oligonucleotide
uucagccca

SEQ ID NO: 1019 - RNA, 10 nt, Artificial Sequence
  Description of Artificial Sequence: Synthetic oligonucleotide
cugcugaacc

SEQ ID NO: 1020 - RNA, 11 nt, Artificial Sequence
  Description of Artificial Sequence: Synthetic oligonucleotide
aguucucuuca

SEQ ID NO: 1021 - RNA, 10 nt, Artificial Sequence
  Description of Artificial Sequence: Synthetic oligonucleotide
cagccuagag

SEQ ID NO: 1022 - RNA, 12 nt, Artificial Sequence
  Description of Artificial Sequence: Synthetic oligonucleotide
ucugugaagugu

SEQ ID NO: 1023 - RNA, 13 nt, Artificial Sequence
  Description of Artificial Sequence: Synthetic oligonucleotide
gagaaaauuucaa

SEQ ID NO: 1024 - RNA, 10 nt, Artificial Sequence
  Description of Artificial Sequence: Synthetic oligonucleotide
auccuccuga

SEQ ID NO: 1025 - RNA, 11 nt, Artificial Sequence
  Description of Artificial Sequence: Synthetic oligonucleotide
ugacaucauau

SEQ ID NO: 1026 - RNA, 12 nt, Artificial Sequence
  Description of Artificial Sequence: Synthetic oligonucleotide
aucuucaucaua

SEQ ID NO: 1027 - RNA, 12 nt, Artificial Sequence
  Description of Artificial Sequence: Synthetic oligonucleotide
acuagcuauuaa

SEQ ID NO: 1028 - RNA, 13 nt, Artificial Sequence
  Description of Artificial Sequence: Synthetic oligonucleotide
cucuacuaaaaau

SEQ ID NO: 1029 - RNA, 11 nt, Artificial Sequence
  Description of Artificial Sequence: Synthetic oligonucleotide
cuaucucgccu

SEQ ID NO: 1030 - RNA, 12 nt, Artificial Sequence
  Description of Artificial Sequence: Synthetic oligonucleotide
uucgguccaguu

SEQ ID NO: 1031 - RNA, 10 nt, Artificial Sequence
  Description of Artificial Sequence: Synthetic oligonucleotide
auguagccgc

SEQ ID NO: 1032 - RNA, 11 nt, Artificial Sequence
  Description of Artificial Sequence: Synthetic oligonucleotide
gaggagacuug

SEQ ID NO: 1033 - RNA, 11 nt, Artificial Sequence
  Description of Artificial Sequence: Synthetic oligonucleotide
aguagugagga

SEQ ID NO: 1034 - RNA, 13 nt, Artificial Sequence
  Description of Artificial Sequence: Synthetic oligonucleotide
agaugaguacaaa

SEQ ID NO: 1035 - RNA, 12 nt, Artificial Sequence
  Description of Artificial Sequence: Synthetic oligonucleotide
uuguuaaugggc

SEQ ID NO: 1036 - RNA, 12 nt, Artificial Sequence
  Description of Artificial Sequence: Synthetic oligonucleotide
uuuuaauuuauu

SEQ ID NO: 1037 - RNA, 11 nt, Artificial Sequence
  Description of Artificial Sequence: Synthetic oligonucleotide
auuuaaauaug

SEQ ID NO: 1038 - RNA, 12 nt, Artificial Sequence
  Description of Artificial Sequence: Synthetic oligonucleotide
auccuuuguuuc

SEQ ID NO: 1039 - RNA, 13 nt, Artificial Sequence
  Description of Artificial Sequence: Synthetic oligonucleotide
gucuaaguguuug

SEQ ID NO: 1040 - RNA, 11 nt, Artificial Sequence
  Description of Artificial Sequence: Synthetic oligonucleotide
ccugugacaaa

SEQ ID NO: 1041 - RNA, 12 nt, Artificial Sequence
  Description of Artificial Sequence: Synthetic oligonucleotide
caggcugaauua

SEQ ID NO: 1042 - RNA, 13 nt, Artificial Sequence
  Description of Artificial Sequence: Synthetic oligonucleotide
ucauucuuacaau

SEQ ID NO: 1043 - RNA, 14 nt, Artificial Sequence
  Description of Artificial Sequence: Synthetic oligonucleotide
cauucuuacaauug

SEQ ID NO: 1044 - RNA, 11 nt, Artificial Sequence
  Description of Artificial Sequence: Synthetic oligonucleotide
agagaguguac

SEQ ID NO: 1045 - RNA, 11 nt, Artificial Sequence
  Description of Artificial Sequence: Synthetic oligonucleotide
gaacucagcag

SEQ ID NO: 1046 - RNA, 12 nt, Artificial Sequence
  Description of Artificial Sequence: Synthetic oligonucleotide
uuauuuucagua

SEQ ID NO: 1047 - RNA, 11 nt, Artificial Sequence
  Description of Artificial Sequence: Synthetic oligonucleotide
cuuaaauggaa

SEQ ID NO: 1048 - RNA, 12 nt, Artificial Sequence
  Description of Artificial Sequence: Synthetic oligonucleotide
gccuaaaauugu

SEQ ID NO: 1049 - RNA, 12 nt, Artificial Sequence
  Description of Artificial Sequence: Synthetic oligonucleotide
acuaacaucugg

SEQ ID NO: 1050 - RNA, 11 nt, Artificial Sequence
  Description of Artificial Sequence: Synthetic oligonucleotide
gacugugagcu

SEQ ID NO: 1051 - RNA, 13 nt, Artificial Sequence
  Description of Artificial Sequence: Synthetic oligonucleotide
gcuuuuuauuaau

SEQ ID NO: 1052 - RNA, 12 nt, Artificial Sequence
  Description of Artificial Sequence: Synthetic oligonucleotide
ucuucuuacauu

SEQ ID NO: 1053 - RNA, 14 nt, Artificial Sequence
  Description of Artificial Sequence: Synthetic oligonucleotide
auuuguaaaaaugu

SEQ ID NO: 1054 - RNA, 14 nt, Artificial Sequence
  Description of Artificial Sequence: Synthetic oligonucleotide
ucuuaauucauauu

SEQ ID NO: 1055 - RNA, 12 nt, Artificial Sequence
  Description of Artificial Sequence: Synthetic oligonucleotide
aacuaaucauga

SEQ ID NO: 1056 - RNA, 11 nt, Artificial Sequence
  Description of Artificial Sequence: Synthetic oligonucleotide
cugcucuuggg

SEQ ID NO: 1057 - RNA, 12 nt, Artificial Sequence
  Description of Artificial Sequence: Synthetic oligonucleotide
aguagcuuugag

SEQ ID NO: 1058 - RNA, 13 nt, Artificial Sequence
  Description of Artificial Sequence: Synthetic oligonucleotide
acguaauauuuca

SEQ ID NO: 1059 - RNA, 12 nt, Artificial Sequence
  Description of Artificial Sequence: Synthetic oligonucleotide
auucucuucacu

SEQ ID NO: 1060 - RNA, 13 nt, Artificial Sequence
  Description of Artificial Sequence: Synthetic oligonucleotide
uaaugcuaagaaa

SEQ ID NO: 1061 - RNA, 11 nt, Artificial Sequence
  Description of Artificial Sequence: Synthetic oligonucleotide
cugaaaaucaa

SEQ ID NO: 1062 - RNA, 13 nt, Artificial Sequence
  Description of Artificial Sequence: Synthetic oligonucleotide
auaugauuacuuu

SEQ ID NO: 1063 - RNA, 13 nt, Artificial Sequence
  Description of Artificial Sequence: Synthetic oligonucleotide
auuuuguucuaca

SEQ ID NO: 1064 - RNA, 11 nt, Artificial Sequence
  Description of Artificial Sequence: Synthetic oligonucleotide
ccgggacucuc

SEQ ID NO: 1065 - RNA, 13 nt, Artificial Sequence
  Description of Artificial Sequence: Synthetic oligonucleotide
cuuuaaaguaaag

SEQ ID NO: 1066 - RNA, 12 nt, Artificial Sequence
  Description of Artificial Sequence: Synthetic oligonucleotide
cuggaagccugg

SEQ ID NO: 1067 - RNA, 13 nt, Artificial Sequence
  Description of Artificial Sequence: Synthetic oligonucleotide
aaacaaaagagag

SEQ ID NO: 1068 - RNA, 12 nt, Artificial Sequence
  Description of Artificial Sequence: Synthetic oligonucleotide
ucaguuaugccg

SEQ ID NO: 1069 - RNA, 12 nt, Artificial Sequence
  Description of Artificial Sequence: Synthetic oligonucleotide
aaaagaagucca

SEQ ID NO: 1070 - RNA, 10 nt, Artificial Sequence
  Description of Artificial Sequence: Synthetic oligonucleotide
ggugagguua

SEQ ID NO: 1071 - RNA, 10 nt, Artificial Sequence
  Description of Artificial Sequence: Synthetic oligonucleotide
ggaagaggac

SEQ ID NO: 1072 - RNA, 12 nt, Artificial Sequence
  Description of Artificial Sequence: Synthetic oligonucleotide
agcaaguauugu

SEQ ID NO: 1073 - RNA, 11 nt, Artificial Sequence
  Description of Artificial Sequence: Synthetic oligonucleotide
uuguagcacuc

SEQ ID NO: 1074 - RNA, 13 nt, Artificial Sequence
  Description of Artificial Sequence: Synthetic oligonucleotide
caaaaccacaaau

SEQ ID NO: 1075 - RNA, 11 nt, Artificial Sequence
  Description of Artificial Sequence: Synthetic oligonucleotide
aagcccauaca

SEQ ID NO: 1076 - RNA, 10 nt, Artificial Sequence
  Description of Artificial Sequence: Synthetic oligonucleotide
gcccauacag

SEQ ID NO: 1077 - RNA, 11 nt, Artificial Sequence
  Description of Artificial Sequence: Synthetic oligonucleotide
agaaaccuucc

SEQ ID NO: 1078 - RNA, 9 nt, Artificial Sequence
  Description of Artificial Sequence: Synthetic oligonucleotide
uauaccuac

SEQ ID NO: 1079 - RNA, 12 nt, Artificial Sequence
  Description of Artificial Sequence: Synthetic oligonucleotide
ccaguuuucgga

SEQ ID NO: 1080 - RNA, 8 nt, Artificial Sequence
  Description of Artificial Sequence: Synthetic oligonucleotide
gaacaggg

SEQ ID NO: 1081 - RNA, 12 nt, Artificial Sequence
  Description of Artificial Sequence: Synthetic oligonucleotide
uaacuuuccagu

SEQ ID NO: 1082 - RNA, 13 nt, Artificial Sequence
  Description of Artificial Sequence: Synthetic oligonucleotide
aaguuugguuuug

SEQ ID NO: 1083 - RNA, 11 nt, Artificial Sequence
  Description of Artificial Sequence: Synthetic oligonucleotide
uucccacugua

SEQ ID NO: 1084 - RNA, 12 nt, Artificial Sequence
  Description of Artificial Sequence: Synthetic oligonucleotide
gauaccauauga

SEQ ID NO: 1085 - RNA, 10 nt, Artificial Sequence
  Description of Artificial Sequence: Synthetic oligonucleotide
acaugggcug

SEQ ID NO: 1086 - RNA, 12 nt, Artificial Sequence
  Description of Artificial Sequence: Synthetic oligonucleotide
aacuuuuucaua

SEQ ID NO: 1087 - RNA, 11 nt, Artificial Sequence
  Description of Artificial Sequence: Synthetic oligonucleotide
augaggccgga

SEQ ID NO: 1088 - RNA, 10 nt, Artificial Sequence
  Description of Artificial Sequence: Synthetic oligonucleotide
cugcauuugu

SEQ ID NO: 1089 - RNA, 12 nt, Artificial Sequence
  Description of Artificial Sequence: Synthetic oligonucleotide
auguuuacuacc

SEQ ID NO: 1090 - RNA, 14 nt, Artificial Sequence
  Description of Artificial Sequence: Synthetic oligonucleotide
auuuuuugaugaaa

SEQ ID NO: 1091 - RNA, 13 nt, Artificial Sequence
  Description of Artificial Sequence: Synthetic oligonucleotide
agugugugaauuu

SEQ ID NO: 1092 - RNA, 12 nt, Artificial Sequence
  Description of Artificial Sequence: Synthetic oligonucleotide
agcaauguaugu

SEQ ID NO: 1093 - RNA, 13 nt, Artificial Sequence
  Description of Artificial Sequence: Synthetic oligonucleotide
aagcacauauaua

SEQ ID NO: 1094 - RNA, 13 nt, Artificial Sequence
  Description of Artificial Sequence: Synthetic oligonucleotide
uaauaguuucucc

SEQ ID NO: 1095 - RNA, 12 nt, Artificial Sequence
  Description of Artificial Sequence: Synthetic oligonucleotide
guuucuccaaau

SEQ ID NO: 1096 - RNA, 12 nt, Artificial Sequence
  Description of Artificial Sequence: Synthetic oligonucleotide
acuuccuagaaa

SEQ ID NO: 1097 - RNA, 12 nt, Artificial Sequence
  Description of Artificial Sequence: Synthetic oligonucleotide
acaccauauaug

SEQ ID NO: 1098 - RNA, 13 nt, Artificial Sequence
  Description of Artificial Sequence: Synthetic oligonucleotide
uauaugaauggag

SEQ ID NO: 1099 - RNA, 12 nt, Artificial Sequence
  Description of Artificial Sequence: Synthetic oligonucleotide
cauuuacaggga

SEQ ID NO: 1100 - RNA, 12 nt, Artificial Sequence
  Description of Artificial Sequence: Synthetic oligonucleotide
auuuacagggac

SEQ ID NO: 1101 - RNA, 9 nt, Artificial Sequence
  Description of Artificial Sequence: Synthetic oligonucleotide
gggaccuga

SEQ ID NO: 1102 - RNA, 13 nt, Artificial Sequence
  Description of Artificial Sequence: Synthetic oligonucleotide
guuugacugcauc

SEQ ID NO: 1103 - RNA, 12 nt, Artificial Sequence
  Description of Artificial Sequence: Synthetic oligonucleotide
uugacugcaucg

SEQ ID NO: 1104 - RNA, 11 nt, Artificial Sequence
  Description of Artificial Sequence: Synthetic oligonucleotide
aguucacaggg

SEQ ID NO: 1105 - RNA, 12 nt, Artificial Sequence
  Description of Artificial Sequence: Synthetic oligonucleotide
gcaccucugucc

SEQ ID NO: 1106 - RNA, 14 nt, Artificial Sequence
  Description of Artificial Sequence: Synthetic oligonucleotide
guuugucuuuuuaa

SEQ ID NO: 1107 - RNA, 13 nt, Artificial Sequence
  Description of Artificial Sequence: Synthetic oligonucleotide
uugucuuuuuaag

SEQ ID NO: 1108 - RNA, 12 nt, Artificial Sequence
  Description of Artificial Sequence: Synthetic oligonucleotide
cuaaagguuguc

SEQ ID NO: 1109 - RNA, 11 nt, Artificial Sequence
  Description of Artificial Sequence: Synthetic oligonucleotide
agguugucgac

SEQ ID NO: 1110 - RNA, 12 nt, Artificial Sequence
  Description of Artificial Sequence: Synthetic oligonucleotide
ccuggcaauugu

SEQ ID NO: 1111 - RNA, 11 nt, Artificial Sequence
  Description of Artificial Sequence: Synthetic oligonucleotide
guggugcgagg

SEQ ID NO: 1112 - RNA, 12 nt, Artificial Sequence
  Description of Artificial Sequence: Synthetic oligonucleotide
gagacaugaaau

SEQ ID NO: 1113 - RNA, 12 nt, Artificial Sequence
  Description of Artificial Sequence: Synthetic oligonucleotide
uauauuucucca

SEQ ID NO: 1114 - RNA, 9 nt, Artificial Sequence
  Description of Artificial Sequence: Synthetic oligonucleotide
augaaggcu

SEQ ID NO: 1115 - RNA, 10 nt, Artificial Sequence
  Description of Artificial Sequence: Synthetic oligonucleotide
cuggaguggu

SEQ ID NO: 1116 - RNA, 10 nt, Artificial Sequence
  Description of Artificial Sequence: Synthetic oligonucleotide
ggaagagagg

SEQ ID NO: 1117 - RNA, 11 nt, Artificial Sequence
  Description of Artificial Sequence: Synthetic oligonucleotide
uugcaucgggc

SEQ ID NO: 1118 - RNA, 12 nt, Artificial Sequence
  Description of Artificial Sequence: Synthetic oligonucleotide
uauccuacugug

SEQ ID NO: 1119 - RNA, 12 nt, Artificial Sequence
  Description of Artificial Sequence: Synthetic oligonucleotide
ccuacuguguaa

SEQ ID NO: 1120 - RNA, 11 nt, Artificial Sequence
  Description of Artificial Sequence: Synthetic oligonucleotide
cuuguagugua

SEQ ID NO: 1121 - RNA, 12 nt, Artificial Sequence
  Description of Artificial Sequence: Synthetic oligonucleotide
cuuuguugauug

SEQ ID NO: 1122 - RNA, 13 nt, Artificial Sequence
  Description of Artificial Sequence: Synthetic oligonucleotide
uuguugauugaaa

SEQ ID NO: 1123 - RNA, 14 nt, Artificial Sequence
  Description of Artificial Sequence: Synthetic oligonucleotide
ucuuuuucuuccau

SEQ ID NO: 1124 - RNA, 12 nt, Artificial Sequence
  Description of Artificial Sequence: Synthetic oligonucleotide
aucuuccuucua

SEQ ID NO: 1125 - RNA, 12 nt, Artificial Sequence
  Description of Artificial Sequence: Synthetic oligonucleotide
ugaaugcuucau

SEQ ID NO: 1126 - RNA, 12 nt, Artificial Sequence
  Description of Artificial Sequence: Synthetic oligonucleotide
gaaugcuucaug

SEQ ID NO: 1127 - RNA, 12 nt, Artificial Sequence
  Description of Artificial Sequence: Synthetic oligonucleotide
auucuacuuuga

SEQ ID NO: 1128 - RNA, 12 nt, Artificial Sequence
  Description of Artificial Sequence: Synthetic oligonucleotide
gcaacuacagac

SEQ ID NO: 1129 - RNA, 12 nt, Artificial Sequence
  Description of Artificial Sequence: Synthetic oligonucleotide
accaaggucaac

SEQ ID NO: 1130 - RNA, 12 nt, Artificial Sequence
  Description of Artificial Sequence: Synthetic oligonucleotide
gacuaucucgac

SEQ ID NO: 1131 - RNA, 12 nt, Artificial Sequence
  Description of Artificial Sequence: Synthetic oligonucleotide
accuucccaaac

SEQ ID NO: 1132 - RNA, 13 nt, Artificial Sequence
  Description of Artificial Sequence: Synthetic oligonucleotide
caagcuuagaacu

SEQ ID NO: 1133 - RNA, 14 nt, Artificial Sequence
  Description of Artificial Sequence: Synthetic oligonucleotide
gcuuagaacuuuaa

SEQ ID NO: 1134 - RNA, 13 nt, Artificial Sequence
  Description of Artificial Sequence: Synthetic oligonucleotide
aacuuuaagcaac

SEQ ID NO: 1135 - RNA, 10 nt, Artificial Sequence
  Description of Artificial Sequence: Synthetic oligonucleotide
agaccaccac

SEQ ID NO: 1136 - RNA, 13 nt, Artificial Sequence
  Description of Artificial Sequence: Synthetic oligonucleotide
cgagaaauaaagu

SEQ ID NO: 1137 - RNA, 13 nt, Artificial Sequence
  Description of Artificial Sequence: Synthetic oligonucleotide
gagaaauaaaguu

SEQ ID NO: 1138 - RNA, 11 nt, Artificial Sequence
  Description of Artificial Sequence: Synthetic oligonucleotide
ggaaaugaucc

SEQ ID NO: 1139 - RNA, 12 nt, Artificial Sequence
  Description of Artificial Sequence: Synthetic oligonucleotide
aagaaaugaaac

SEQ ID NO: 1140 - RNA, 12 nt, Artificial Sequence
  Description of Artificial Sequence: Synthetic oligonucleotide
uuuccauccucc

SEQ ID NO: 1141 - RNA, 14 nt, Artificial Sequence
  Description of Artificial Sequence: Synthetic oligonucleotide
cugaaaaucuuuga

SEQ ID NO: 1142 - RNA, 10 nt, Artificial Sequence
  Description of Artificial Sequence: Synthetic oligonucleotide
gccguucagg

SEQ ID NO: 1143 - RNA, 12 nt, Artificial Sequence
  Description of Artificial Sequence: Synthetic oligonucleotide
aggguccagaag

SEQ ID NO: 1144 - RNA, 12 nt, Artificial Sequence
  Description of Artificial Sequence: Synthetic oligonucleotide
caagacugcuug

SEQ ID NO: 1145 - RNA, 12 nt, Artificial Sequence
  Description of Artificial Sequence: Synthetic oligonucleotide
ccaugucuuugg

SEQ ID NO: 1146 - RNA, 10 nt, Artificial Sequence
  Description of Artificial Sequence: Synthetic oligonucleotide
ccugaaacac

SEQ ID NO: 1147 - RNA, 11 nt, Artificial Sequence
  Description of Artificial Sequence: Synthetic oligonucleotide
cucuguaccuc

SEQ ID NO: 1148 - RNA, 11 nt, Artificial Sequence
  Description of Artificial Sequence: Synthetic oligonucleotide
gcaagacaaga

SEQ ID NO: 1149 - RNA, 12 nt, Artificial Sequence
  Description of Artificial Sequence: Synthetic oligonucleotide
caagacaagaaa

SEQ ID NO: 1150 - RNA, 11 nt, Artificial Sequence
  Description of Artificial Sequence: Synthetic oligonucleotide
guacaagaucc

SEQ ID NO: 1151 - RNA, 11 nt, Artificial Sequence
  Description of Artificial Sequence: Synthetic oligonucleotide
guacuugcaga

SEQ ID NO: 1152 - RNA, 12 nt, Artificial Sequence
  Description of Artificial Sequence: Synthetic oligonucleotide
gaucgauacaga

SEQ ID NO: 1153 - RNA, 12 nt, Artificial Sequence
  Description of Artificial Sequence: Synthetic oligonucleotide
auaaaaauaaau

SEQ ID NO: 1154 - RNA, 12 nt, Artificial Sequence
  Description of Artificial Sequence: Synthetic oligonucleotide
aaaaauaaauau

SEQ ID NO: 1155 - RNA, 12 nt, Artificial Sequence
  Description of Artificial Sequence: Synthetic oligonucleotide
uugacugcugug

SEQ ID NO: 1156 - RNA, 12 nt, Artificial Sequence
  Description of Artificial Sequence: Synthetic oligonucleotide
gagaugagagac

SEQ ID NO: 1157 - RNA, 9 nt, Artificial Sequence
  Description of Artificial Sequence: Synthetic oligonucleotide
cccacuugg

SEQ ID NO: 1158 - RNA, 14121 nt, Homo sapiens
auucccaccgggaccugcggggcugagugcccuucucgguugcugccgcugaggagcccgcccagccagccagggccgcgaggccgaggccaggccgcagcccaggagccgccccaccgcagcuggcgauggacccgccgaggcccgcgcugcuggcgcugcuggcgcugccugcgcugcugcugcugcugcuggcgggcgccagggccgaagaggaaaugcuggaaaaugucagccuggucuguccaaaagaugcgacccgauucaagcaccuccggaaguacacauacaacuaugaggcugagaguuccaguggagucccugggacugcugauucaagaagugccaccaggaucaacugcaagguugagcuggagguuccccagcucugcagcuucauccugaagaccagccagugcacccugaaagagguguauggcuucaacccugagggcaaagccuugcugaagaaaaccaagaacucugaggaguuugcugcagccauguccagguaugagcucaagcuggccauuccagaagggaagcagguuuuccuuuacccggagaaagaugaaccuacuuacauccugaacaucaagaggggcaucauuucugcccuccugguucccccagagacagaagaagccaagcaaguguuguuucuggauaccguguauggaaacugcuccacucacuuuaccgucaagacgaggaagggcaauguggcaacagaaauauccacugaaagagaccuggggcagugugaucgcuucaagcccauccgcacaggcaucagcccacuugcucucaucaaaggcaugacccgccccuugucaacucugaucagcagcagccaguccugucaguacacacuggacgcuaagaggaagcauguggcagaagccaucugcaaggagcaacaccucuuccugccuuucuccuacaagaauaaguaugggaugguagcacaagugacacagacuuugaaacuugaagacacaccaaagaucaacagccgcuucuuuggugaagguacuaagaagaugggccucgcauuugagagcaccaaauccacaucaccuccaaagcaggccgaagcuguuuugaagacucuccaggaacugaaaaaacuaaccaucucugagcaaaauauccagagagcuaaucucuucaauaagcugguuacugagcugagaggccucagugaugaagcagucacaucucucuugccacagcugauugagguguccagccccaucacuuuacaagccuugguucaguguggacagccucagugcuccacucacauccuccaguggcugaaacgugugcaugccaacccccuucugauagauguggucaccuaccugguggcccugauccccgagcccucagcacagcagcugcgagagaucuucaacauggcgagggaucagcgcagccgagccaccuuguaugcgcugagccacgcggucaacaacuaucauaagacaaacccuacagggacccaggagcugcuggacauugcuaauuaccugauggaacagauucaagaugacugcacuggggaugaagauuacaccuauuugauucugcgggucauuggaaauaugggccaaaccauggagcaguuaacuccagaacucaagucuucaauccugaaauguguccaaaguacaaagccaucacugaugauccagaaagcugccauccaggcucugcggaaaauggagccuaaagacaaggaccaggagguucuucuucagacuuuccuugaugaugcuucuccgggagauaagcgacuggcugccuaucuuauguugaugaggaguccuucacaggcagauauuaacaaaauuguccaaauucuaccaugggaacagaaugagcaagugaagaacuuuguggcuucccauauugccaauaucuugaacucagaagaauuggauauccaagaucugaaaaaguuagugaaagaagcucugaaagaaucucaacuuccaacugucauggacuucagaaaauucucucggaacuaucaacucuacaaaucuguuucucuuccaucacuugacccagccucagccaaaauagaagggaaucuuauauuugauccaaauaacuaccuuccuaaagaaagcaugcugaaaacuacccucacugccuuuggauuugcuucagcugaccucaucgagauuggcuuggaaggaaaaggcuuugagccaacauuggaagcucuuuuugggaagcaaggauuuuucccagacagugucaacaaagcuuuguacuggguuaauggucaaguuccugauggugucucuaaggucuuaguggaccacuuuggcuauaccaaagaugauaaacaugagcaggauaugguaaauggaauaaugcucaguguugagaagcugauuaaagauuugaaauccaaagaagucccggaagccagagccuaccuccgcaucuugggagaggagcuugguuuugccagucuccaugaccuccagcuccugggaaagcugcuucugaugggugcccgcacucugcaggggaucccccagaugauuggagaggucaucaggaagggcucaaagaaugacuuuuuucuucacuacaucuucauggagaaugccuuugaacuccccacuggagcuggauuacaguugcaaauaucuucaucuggagucauugcucccggagccaaggcuggaguaaaacuggaaguagccaacaugcaggcugaacugguggcaaaacccuccgugucuguggaguuugugacaaauaugggcaucaucauuccggacuucgcuaggagugggguccagaugaacaccaacuucuuccacgagucgggucuggaggcucauguugcccuaaaagcugggaagcugaaguuuaucauuccuuccccaaagagaccagucaagcugcucaguggaggcaacacauuacauuuggucucuaccaccaaaacggaggugaucccaccucucauugagaacaggcaguccuggucaguuugcaagcaagucuuuccuggccugaauuacugcaccucaggcgcuuacuccaacgccagcuccacagacuccgccuccuacuauccgcugaccggggacaccagauuagagcuggaacugaggccuacaggagagauugagcaguauucugucagcgcaaccuaugagcuccagagagaggacagagccuugguggauacccugaaguuuguaacucaagcagaaggugcgaagcagacugaggcuaccaugacauucaaauauaaucggcagaguaugaccuuguccagugaaguccaaauuccggauuuugauguugaccucggaacaauccucagaguuaaugaugaaucuacugagggcaaaacgucuuacagacucacccuggacauucagaacaagaaaauuacugaggucgcccucaugggccaccuaaguugugacacaaaggaagaaagaaaaaucaaggguguuauuuccauaccccguuugcaagcagaagccagaagugagauccucgcccacuggucgccugccaaacugcuucuccaaauggacucaucugcuacagcuuauggcuccacaguuuccaagaggguggcauggcauuaugaugaagagaagauugaauuugaauggaacacaggcaccaauguagauaccaaaaaaaugacuuccaauuucccuguggaucucuccgauuauccuaagagcuugcauauguaugcuaauagacuccuggaucacagagucccucaaacagacaugacuuuccggcacguggguuccaaauuaauaguugcaaugagcucauggcuucagaaggcaucugggagucuuccuuauacccagacuuugcaagaccaccucaauagccugaaggaguucaaccuccagaacaugggauugccagacuuccacaucccagaaaaccucuucuuaaaaagcgauggccgggucaaauauaccuugaacaagaacaguuugaaaauugagauuccuuugccuuuugguggcaaauccuccagagaucuaaagauguuagagacuguuaggacaccagcccuccacuucaagucugugggauuccaucugccaucucgagaguuccaagucccuacuuuuaccauucccaaguuguaucaacugcaagugccucuccuggguguucuagaccucuccacgaaugucuacagcaacuuguacaacugguccgccuccuacagugguggcaacaccagcacagaccauuucagccuucgggcucguuaccacaugaaggcugacucugugguugaccugcuuuccuacaaugugcaaggaucuggagaaacaacauaugaccacaagaauacguucacacuaucaugugaugggucucuacgccacaaauuucuagauucgaauaucaaauucagucauguagaaaaacuuggaaacaacccagucucaaaagguuuacuaauauucgaugcaucuaguuccuggggaccacagaugucugcuucaguucauuuggacuccaaaaagaaacagcauuuguuugucaaagaagucaagauugaugggcaguucagagucucuucguucuaugcuaaaggcacauauggccugucuugucagagggauccuaacacuggccggcucaauggagaguccaaccugagguuuaacuccuccuaccuccaaggcaccaaccagauaacaggaagauaugaagauggaacccucucccucaccuccaccucugaucugcaaaguggcaucauuaaaaauacugcuucccuaaaguaugagaacuacgagcugacuuuaaaaucugacaccaaugggaaguauaagaacuuugccacuucuaacaagauggauaugaccuucucuaagcaaaaugcacugcugcguucugaauaucaggcugauuacgagucauugagguucuucagccugcuuucuggaucacuaaauucccauggucuugaguuaaaugcugacaucuuaggcacugacaaaauuaauaguggugcucacaaggcgacacuaaggauuggccaagauggaauaucuaccagugcaacgaccaacuugaaguguagucuccuggugcuggagaaugagcugaaugcagagcuuggccucucuggggcaucuaugaaauuaacaacaaauggccgcuucagggaacacaaugcaaaauucagucuggaugggaaagccgcccucacagagcuaucacugggaagugcuuaucaggccaugauucugggugucgacagcaaaaacauuuucaacuucaaggucagucaagaaggacuuaagcucucaaaugacaugaugggcucauaugcugaaaugaaauuugaccacacaaacagucugaacauugcaggcuuaucacuggacuucucuucaaaacuugacaacauuuacagcucugacaaguuuuauaagcaaacuguuaauuuacagcuacagcccuauucucugguaacuacuuuaaacagugaccugaaauacaaugcucuggaucucaccaacaaugggaaacuacggcuagaaccccugaagcugcauguggcugguaaccuaaaaggagccuaccaaaauaaugaaauaaaacacaucuaugccaucucuucugcugccuuaucagcaagcuauaaagcagacacuguugcuaagguucaggguguggaguuuagccaucggcucaacacagacaucgcugggcuggcuucagccauugacaugagcacaaacuauaauucagacucacugcauuucagcaaugucuuccguucuguaauggccccguuuaccaugaccaucgaugcacauacaaauggcaaugggaaacucgcucucuggggagaacauacugggcagcuguauagcaaauuccuguugaaagcagaaccucuggcauuuacuuucucucaugauuacaaaggcuccacaagucaucaucucgugucuaggaaaagcaucagugcagcucuugaacacaaagucagugcccugcuuacuccagcugagcagacaggcaccuggaaacucaagacccaauuuaacaacaaugaauacagccaggacuuggaugcuuacaacacuaaagauaaaauuggcguggagcuuacuggacgaacucuggcugaccuaacucuacuagacuccccaauuaaagugccacuuuuacucagugagcccaucaauaucauugaugcuuuagagaugagagaugccguugagaagccccaagaauuuacaauuguugcuuuuguaaaguaugauaaaaaccaagauguucacuccauuaaccucccauuuuuugagaccuugcaagaauauuuugagaggaaucgacaaaccauuauaguuguacuggaaaacguacagagaaaccugaagcacaucaauauugaucaauuuguaagaaaauacagagcagcccugggaaaacucccacagcaagcuaaugauuaucugaauucauucaauugggagagacaaguuucacaugccaaggagaaacugacugcucucacaaaaaaguauagaauuacagaaaaugauauacaaauugcauuagaugaugccaaaaucaacuuuaaugaaaaacuaucucaacugcagacauauaugauacaauuugaucaguauauuaaagauaguuaugauuuacaugauuugaaaauagcuauugcuaauauuauugaugaaaucauugaaaaauuaaaaagucuugaugagcacuaucauauccguguaaauuuaguaaaaacaauccaugaucuacauuuguuuauugaaaauauugauuuuaacaaaaguggaaguaguacugcauccuggauucaaaauguggauacuaaguaccaaaucagaauccagauacaagaaaaacugcagcagcuuaagagacacauacagaauauagacauccagcaccuagcuggaaaguuaaaacaacacauugaggcuauugauguuagagugcuuuuagaucaauugggaacuacaauuucauuugaaagaauaaaugacguucuugagcaugucaaacacuuuguuauaaaucuuauuggggauuuugaaguagcugagaaaaucaaugccuucagagccaaaguccaugaguuaaucgagagguaugaaguagaccaacaaauccagguuuuaauggauaaauuaguagaguuggcccaccaauacaaguugaaggagacuauucagaagcuaagcaauguccuacaacaaguuaagauaaaagauuacuuugagaaauugguuggauuuauugaugaugcugucaagaagcuuaaugaauuaucuuuuaaaacauucauugaagauguuaacaaauuccuugacauguugauaaagaaauuaaagucauuugauuaccaccaguuuguagaugaaaccaaugacaaaauccgugaggugacucagagacucaauggugaaauucaggcucuggaacuaccacaaaaagcugaagcauuaaaacuguuuuuagaggaaaccaaggccacaguugcaguguaucuggaaagccuacaggacaccaaaauaaccuuaaucaucaauugguuacaggaggcuuuaaguucagcaucuuuggcucacaugaaggccaaauuccgagagacccuagaagauacacgagaccgaauguaucaaauggacauucagcaggaacuucaacgauaccugucucugguaggccagguuuauagcacacuugucaccuacauuucugauugguggacucuugcugcuaagaaccuuacugacuuugcagagcaauauucuauccaagauugggcuaaacguaugaaagcauugguagagcaaggguucacuguuccugaaaucaagaccauccuugggaccaugccugccuuugaagucagucuucaggcucuucagaaagcuaccuuccagacaccugauuuuauagucccccuaacagauuugaggauuccaucaguucagauaaacuucaaagacuuaaaaaauauaaaaaucccauccagguuuuccacaccagaauuuaccauccuuaacaccuuccacauuccuuccuuuacaauugacuuuguagaaaugaaaguaaagaucaucagaaccauugaccagaugcugaacagugagcugcaguggcccguuccagauauauaucucagggaucugaagguggaggacauuccucuagcgagaaucacccugccagacuuccguuuaccagaaaucgcaauuccagaauucauaaucccaacucucaaccuuaaugauuuucaaguuccugaccuucacauaccagaauuccagcuuccccacaucucacacacaauugaaguaccuacuuuuggcaagcuauacaguauucugaaaauccaaucuccucuuuucacauuagaugcaaaugcugacauagggaauggaaccaccucagcaaacgaagcagguaucgcagcuuccaucacugccaaaggagaguccaaauuagaaguucucaauuuugauuuucaagcaaaugcacaacucucaaacccuaagauuaauccgcuggcucugaaggagucagugaaguucuccagcaaguaccugagaacggagcaugggagugaaaugcuguuuuuuggaaaugcuauugagggaaaaucaaacacaguggcaaguuuacacacagaaaaaaauacacuggagcuuaguaauggagugauugucaagauaaacaaucagcuuacccuggauagcaacacuaaauacuuccacaaauugaacauccccaaacuggacuucucuagucaggcugaccugcgcaacgagaucaagacacuguugaaagcuggccacauagcauggacuucuucuggaaaagggucauggaaaugggccugccccagauucucagaugagggaacacaugaaucacaaauuaguuucaccauagaaggaccccucacuuccuuuggacuguccaauaagaucaauagcaaacaccuaagaguaaaccaaaacuugguuuaugaaucuggcucccucaacuuuucuaaacuugaaauucaaucacaagucgauucccagcaugugggccacaguguucuaacugcuaaaggcauggcacuguuuggagaagggaaggcagaguuuacugggaggcaugaugcucauuuaaauggaaagguuauuggaacuuugaaaaauucucuuuucuuuucagcccagccauuugagaucacggcauccacaaacaaugaagggaauuugaaaguucguuuuccauuaagguuaacagggaagauagacuuccugaauaacuaugcacuguuucugagucccagugcccagcaagcaaguuggcaaguaagugcuagguucaaucaguauaaguacaaccaaaauuucucugcuggaaacaacgagaacauuauggaggcccauguaggaauaaauggagaagcaaaucuggauuucuuaaacauuccuuuaacaauuccugaaaugcgucuaccuuacacaauaaucacaacuccuccacugaaagauuucucucuaugggaaaaaacaggcuugaaggaauucuugaaaacgacaaagcaaucauuugauuuaaguguaaaagcucaguauaagaaaaacaaacacaggcauuccaucacaaauccuuuggcugugcuuugugaguuuaucagucagagcaucaaauccuuugacaggcauuuugaaaaaaacagaaacaaugcauuagauuuugucaccaaauccuauaaugaaacaaaaauuaaguuugauaaguacaaagcugaaaaaucucacgacgagcuccccaggaccuuucaaauuccuggauacacuguuccaguugucaauguugaagugucuccauucaccauagagaugucggcauucggcuauguguucccaaaagcagucagcaugccuaguuucuccauccuagguucugacguccgugugccuucauacacauuaauccugccaucauuagagcugccaguccuucaugucccuagaaaucucaagcuuucucuuccagauuucaaggaauuguguaccauaagccauauuuuuauuccugccaugggcaauauuaccuaugauuucuccuuuaaaucaagugucaucacacugaauaccaaugcugaacuuuuuaaccagucagauauuguugcucaucuccuuucuucaucuucaucugucauugaugcacugcaguacaaauuagagggcaccacaagauugacaagaaaaaggggauugaaguuagccacagcucugucucugagcaacaaauuuguggaggguagucauaacaguacugugagcuuaaccacgaaaaauauggaagugucaguggcaacaaccacaaaagcccaaauuccaauuuugagaaugaauuucaagcaagaacuuaauggaaauaccaagucaaaaccuacugucucuuccuccauggaauuuaaguaugauuucaauucuucaaugcuguacucuaccgcuaaaggagcaguugaccacaagcuuagcuuggaaagccucaccucuuacuuuuccauugagucaucuaccaaaggagaugucaaggguucgguucuuucucgggaauauucaggaacuauugcuagugaggccaacacuuacuugaauuccaagagcacacggucuucagugaagcugcagggcacuuccaaaauugaugauaucuggaaccuugaaguaaaagaaaauuuugcuggagaagccacacuccaacgcauauauucccucugggagcacaguacgaaaaaccacuuacagcuagagggccucuuuuucaccaacggagaacauacaagcaaagccacccuggaacucucuccauggcaaaugucagcucuuguucagguccaugcaagucagcccaguuccuuccaugauuucccugaccuuggccaggaaguggcccugaaugcuaacacuaagaaccagaagaucagauggaaaaaugaaguccggauucauucugggucuuuccagagccaggucgagcuuuccaaugaccaagaaaaggcacaccuugacauugcaggauccuuagaaggacaccuaagguuccucaaaaauaucauccuaccagucuaugacaagagcuuaugggauuuccuaaagcuggauguaaccaccagcauugguaggagacagcaucuucguguuucaacugccuuuguguacaccaaaaaccccaauggcuauucauucuccaucccuguaaaaguuuuggcugauaaauucauuauuccugggcugaaacuaaaugaucuaaauucaguucuugucaugccuacguuccaugucccauuuacagaucuucagguuccaucgugcaaacuugacuucagagaaauacaaaucuauaagaagcugagaacuucaucauuugcccucaaccuaccaacacuccccgagguaaaauucccugaaguugauguguuaacaaaauauucucaaccagaagacuccuugauucccuuuuuugagauaaccgugccugaaucucaguuaacugugucccaguucacgcuuccaaaaaguguuucagauggcauugcugcuuuggaucuaaaugcaguagccaacaagaucgcagacuuugaguugcccaccaucaucgugccugagcagaccauugagauucccuccauuaaguucucuguaccugcuggaauugucauuccuuccuuucaagcacugacugcacgcuuugagguagacucucccguguauaaugccacuuggagugccaguuugaaaaacaaagcagauuauguugaaacaguccuggauuccacaugcagcucaaccguacaguuccuagaauaugaacuaaauguuuugggaacacacaaaaucgaagaugguacguuagccucuaagacuaaaggaacauuugcacaccgugacuucagugcagaauaugaagaagauggcaaauaugaaggacuucaggaaugggaaggaaaagcgcaccucaauaucaaaagcccagcguucaccgaucuccaucugcgcuaccagaaagacaagaaaggcaucuccaccucagcagccuccccagccguaggcaccgugggcauggauauggaugaagaugacgacuuuucuaaauggaacuucuacuacagcccucaguccucuccagauaaaaaacucaccauauucaaaacugaguugaggguccgggaaucugaugaggaaacucagaucaaaguuaauugggaagaagaggcagcuucuggcuugcuaaccucucugaaagacaacgugcccaaggccacagggguccuuuaugauuaugucaacaaguaccacugggaacacacagggcucacccugagagaagugucuucaaagcugagaagaaaucugcagaacaaugcugaguggguuuaucaaggggccauuaggcaaauugaugauaucgacgugagguuccagaaagcagccaguggcaccacugggaccuaccaagaguggaaggacaaggcccagaaucuguaccaggaacuguugacucaggaaggccaagccaguuuccagggacucaaggauaacguguuugauggcuugguacgaguuacucaagaauuccauaugaaagucaagcaucugauugacucacucauugauuuucugaacuuccccagauuccaguuuccggggaaaccugggauauacacuagggaggaacuuugcacuauguucauaagggagguagggacgguacugucccagguauauucgaaaguccauaaugguucagaaauacuguuuuccuauuuccaagaccuagugauuacacuuccuuucgaguuaaggaaacauaaacuaauagauguaaucucgauguauagggaacuguugaaagauuuaucaaaagaagcccaagagguauuuaaagccauucagucucucaagaccacagaggugcuacguaaucuucaggaccuuuuacaauucauuuuccaacuaauagaagauaacauuaaacagcugaaagagaugaaauuuacuuaucuuauuaauuauauccaagaugagaucaacacaaucuucagugauuauaucccauauguuuuuaaauuguugaaagaaaaccuaugccuuaaucuucauaaguucaaugaauuuauucaaaacgagcuucaggaagcuucucaagaguuacagcagauccaucaauacauuauggcccuucgugaagaauauuuugauccaaguauaguuggcuggacagugaaauauuaugaacuugaagaaaagauagucagucugaucaagaaccuguuaguugcucuuaaggacuuccauucugaauauauugucagugccucuaacuuuacuucccaacucucaagucaaguugagcaauuucugcacagaaauauucaggaauaucuuagcauccuuaccgauccagauggaaaagggaaagagaagauugcagagcuuucugccacugcucaggaaauaauuaaaagccaggccauugcgacgaagaaaauaauuucugauuaccaccagcaguuuagauauaaacugcaagauuuuucagaccaacucucugauuacuaugaaaaauuuauugcugaauccaaaagauugauugaccuguccauucaaaacuaccacacauuucugauauacaucacggaguuacugaaaaagcugcaaucaaccacagucaugaaccccuacaugaagcuugcuccaggagaacuuacuaucauccucuaauuuuuuaaaagaaaucuucauuuauucuucuuuuccaauugaacuuucacauagcacagaaaaaauucaaacugccuauauugauaaaaccauacagugagccagccuugcaguaggcaguagacuauaagcagaagcacauaugaacuggaccugcaccaaagcuggcaccagggcucggaaggucucugaacucagaaggauggcauuuuuugcaaguuaaagaaaaucaggaucugaguuauuuugcuaaacuugggggaggaggaacaaauaaauggagucuuuauuguguaucaua

SEQ ID NO: 1159 - RNA, 19 nt, Artificial Sequence
  Description of Artificial Sequence: Synthetic oligonucleotide
auucccaccgggaccugcg

SEQ ID NO: 1160 - RNA, 19 nt, Artificial Sequence
  Description of Artificial Sequence: Synthetic oligonucleotide
ggggcugagugcccuucuc

SEQ ID NO: 1161 - RNA, 19 nt, Artificial Sequence
  Description of Artificial Sequence: Synthetic oligonucleotide
cgguugcugccgcugagga

SEQ ID NO: 1162 - RNA, 19 nt, Artificial Sequence
  Description of Artificial Sequence: Synthetic oligonucleotide
agcccgcccagccagccag

SEQ ID NO: 1163 - RNA, 19 nt, Artificial Sequence
  Description of Artificial Sequence: Synthetic oligonucleotide
gggccgcgaggccgaggcc

SEQ ID NO: 1164 - RNA, 19 nt, Artificial Sequence
  Description of Artificial Sequence: Synthetic oligonucleotide
caggccgcagcccaggagc

SEQ ID NO: 1165 - RNA, 19 nt, Artificial Sequence
  Description of Artificial Sequence: Synthetic oligonucleotide
ccgccccaccgcagcuggc

SEQ ID NO: 1166 - RNA, 19 nt, Artificial Sequence
  Description of Artificial Sequence: Synthetic oligonucleotide
cgauggacccgccgaggcc

SEQ ID NO: 1167 - RNA, 19 nt, Artificial Sequence
  Description of Artificial Sequence: Synthetic oligonucleotide
ccgcgcugcuggcgcugcu

SEQ ID NO: 1168 - RNA, 19 nt, Artificial Sequence
  Description of Artificial Sequence: Synthetic oligonucleotide
uggcgcugccugcgcugcu

SEQ ID NO: 1169 - RNA, 19 nt, Artificial Sequence
  Description of Artificial Sequence: Synthetic oligonucleotide
ugcugcugcugcuggcggg

SEQ ID NO: 1170 - RNA, 19 nt, Artificial Sequence
  Description of Artificial Sequence: Synthetic oligonucleotide
gcgccagggccgaagagga

SEQ ID NO: 1171 - RNA, 19 nt, Artificial Sequence
  Description of Artificial Sequence: Synthetic oligonucleotide
aaaugcuggaaaaugucag

SEQ ID NO: 1172 - RNA, 19 nt, Artificial Sequence
  Description of Artificial Sequence: Synthetic oligonucleotide
gccuggucuguccaaaaga

SEQ ID NO: 1173 - RNA, 19 nt, Artificial Sequence
  Description of Artificial Sequence: Synthetic oligonucleotide
augcgacccgauucaagca

SEQ ID NO: 1174 - RNA, 19 nt, Artificial Sequence
  Description of Artificial Sequence: Synthetic oligonucleotide
accuccggaaguacacaua

SEQ ID NO: 1175 - RNA, 19 nt, Artificial Sequence
  Description of Artificial Sequence: Synthetic oligonucleotide
acaacuaugaggcugagag

SEQ ID NO: 1176 - RNA, 19 nt, Artificial Sequence
  Description of Artificial Sequence: Synthetic oligonucleotide
guuccaguggagucccugg

SEQ ID NO: 1177 - RNA, 19 nt, Artificial Sequence
  Description of Artificial Sequence: Synthetic oligonucleotide
ggacugcugauucaagaag

SEQ ID NO: 1178 - RNA, 19 nt, Artificial Sequence
  Description of Artificial Sequence: Synthetic oligonucleotide
gugccaccaggaucaacug

SEQ ID NO: 1179 - RNA, 19 nt, Artificial Sequence
  Description of Artificial Sequence: Synthetic oligonucleotide
gcaagguugagcuggaggu

SEQ ID NO: 1180 - RNA, 19 nt, Artificial Sequence
  Description of Artificial Sequence: Synthetic oligonucleotide
uuccccagcucugcagcuu

SEQ ID NO: 1181 - RNA, 19 nt, Artificial Sequence
  Description of Artificial Sequence: Synthetic oligonucleotide
ucauccugaagaccagcca

SEQ ID NO: 1182 - RNA, 19 nt, Artificial Sequence
  Description of Artificial Sequence: Synthetic oligonucleotide
agugcacccugaaagaggu

SEQ ID NO: 1183 - RNA, 19 nt, Artificial Sequence
  Description of Artificial Sequence: Synthetic oligonucleotide
uguauggcuucaacccuga

SEQ ID NO: 1184 - RNA, 19 nt, Artificial Sequence
  Description of Artificial Sequence: Synthetic oligonucleotide
agggcaaagccuugcugaa

SEQ ID NO: 1185 - RNA, 19 nt, Artificial Sequence
  Description of Artificial Sequence: Synthetic oligonucleotide
agaaaaccaagaacucuga

SEQ ID NO: 1186 - RNA, 19 nt, Artificial Sequence
  Description of Artificial Sequence: Synthetic oligonucleotide
aggaguuugcugcagccau

SEQ ID NO: 1187 - RNA, 19 nt, Artificial Sequence
  Description of Artificial Sequence: Synthetic oligonucleotide
uguccagguaugagcucaa

SEQ ID NO: 1188 - RNA, 19 nt, Artificial Sequence
  Description of Artificial Sequence: Synthetic oligonucleotide
agcuggccauuccagaagg

SEQ ID NO: 1189 - RNA, 19 nt, Artificial Sequence
  Description of Artificial Sequence: Synthetic oligonucleotide
ggaagcagguuuuccuuua

SEQ ID NO: 1190 - RNA, 19 nt, Artificial Sequence
  Description of Artificial Sequence: Synthetic oligonucleotide
acccggagaaagaugaacc

SEQ ID NO: 1191 - RNA, 19 nt, Artificial Sequence
  Description of Artificial Sequence: Synthetic oligonucleotide
cuacuuacauccugaacau

SEQ ID NO: 1192 - RNA, 19 nt, Artificial Sequence
  Description of Artificial Sequence: Synthetic oligonucleotide
ucaagaggggcaucauuuc

SEQ ID NO: 1193 - RNA, 19 nt, Artificial Sequence
  Description of Artificial Sequence: Synthetic oligonucleotide
cugcccuccugguuccccc

SEQ ID NO: 1194 - RNA, 19 nt, Artificial Sequence
  Description of Artificial Sequence: Synthetic oligonucleotide
cagagacagaagaagccaa

SEQ ID NO: 1195 - RNA, 19 nt, Artificial Sequence
  Description of Artificial Sequence: Synthetic oligonucleotide
agcaaguguuguuucugga

SEQ ID NO: 1196 - RNA, 19 nt, Artificial Sequence
  Description of Artificial Sequence: Synthetic oligonucleotide
auaccguguauggaaacug

SEQ ID NO: 1197 - RNA, 19 nt, Artificial Sequence
  Description of Artificial Sequence: Synthetic oligonucleotide
gcuccacucacuuuaccgu

SEQ ID NO: 1198 - RNA, 19 nt, Artificial Sequence
  Description of Artificial Sequence: Synthetic oligonucleotide
ucaagacgaggaagggcaa

SEQ ID NO: 1199 - RNA, 19 nt, Artificial Sequence
  Description of Artificial Sequence: Synthetic oligonucleotide
auguggcaacagaaauauc

SEQ ID NO: 1200 - RNA, 19 nt, Artificial Sequence
  Description of Artificial Sequence: Synthetic oligonucleotide
ccacugaaagagaccuggg

SEQ ID NO: 1201 - RNA, 19 nt, Artificial Sequence
  Description of Artificial Sequence: Synthetic oligonucleotide
ggcagugugaucgcuucaa

SEQ ID NO: 1202 - RNA, 19 nt, Artificial Sequence
  Description of Artificial Sequence: Synthetic oligonucleotide
agcccauccgcacaggcau

SEQ ID NO: 1203 - RNA, 19 nt, Artificial Sequence
  Description of Artificial Sequence: Synthetic oligonucleotide
ucagcccacuugcucucau

SEQ ID NO: 1204 - RNA, 19 nt, Artificial Sequence
  Description of Artificial Sequence: Synthetic oligonucleotide
ucaaaggcaugacccgccc

SEQ ID NO: 1205 - RNA, 19 nt, Artificial Sequence
  Description of Artificial Sequence: Synthetic oligonucleotide
ccuugucaacucugaucag

SEQ ID NO: 1206 - RNA, 19 nt, Artificial Sequence
  Description of Artificial Sequence: Synthetic oligonucleotide
gcagcagccaguccuguca

SEQ ID NO: 1207 - RNA, 19 nt, Artificial Sequence
  Description of Artificial Sequence: Synthetic oligonucleotide
aguacacacuggacgcuaa

SEQ ID NO: 1208 - RNA, 19 nt, Artificial Sequence
  Description of Artificial Sequence: Synthetic oligonucleotide
agaggaagcauguggcaga

SEQ ID NO: 1209 - RNA, 19 nt, Artificial Sequence
  Description of Artificial Sequence: Synthetic oligonucleotide
aagccaucugcaaggagca

SEQ ID NO: 1210 - RNA, 19 nt, Artificial Sequence
  Description of Artificial Sequence: Synthetic oligonucleotide
aacaccucuuccugccuuu

SEQ ID NO: 1211 - RNA, 19 nt, Artificial Sequence
  Description of Artificial Sequence: Synthetic oligonucleotide
ucuccuacaagaauaagua

SEQ ID NO: 1212 - RNA, 19 nt, Artificial Sequence
  Description of Artificial Sequence: Synthetic oligonucleotide
augggaugguagcacaagu

SEQ ID NO: 1213 - RNA, 19 nt, Artificial Sequence
  Description of Artificial Sequence: Synthetic oligonucleotide
ugacacagacuuugaaacu

SEQ ID NO: 1214 - RNA, 19 nt, Artificial Sequence
  Description of Artificial Sequence: Synthetic oligonucleotide
uugaagacacaccaaagau

SEQ ID NO: 1215 - RNA, 19 nt, Artificial Sequence
  Description of Artificial Sequence: Synthetic oligonucleotide
ucaacagccgcuucuuugg

SEQ ID NO: 1216 - RNA, 19 nt, Artificial Sequence
  Description of Artificial Sequence: Synthetic oligonucleotide
gugaagguacuaagaagau

SEQ ID NO: 1217 - RNA, 19 nt, Artificial Sequence
  Description of Artificial Sequence: Synthetic oligonucleotide
ugggccucgcauuugagag

SEQ ID NO: 1218 - RNA, 19 nt, Artificial Sequence
  Description of Artificial Sequence: Synthetic oligonucleotide
gcaccaaauccacaucacc

SEQ ID NO: 1219 - RNA, 19 nt, Artificial Sequence
  Description of Artificial Sequence: Synthetic oligonucleotide
cuccaaagcaggccgaagc

SEQ ID NO: 1220 - RNA, 19 nt, Artificial Sequence
  Description of Artificial Sequence: Synthetic oligonucleotide
cuguuuugaagacucucca

SEQ ID NO: 1221 - RNA, 19 nt, Artificial Sequence
  Description of Artificial Sequence: Synthetic oligonucleotide
aggaacugaaaaaacuaac

SEQ ID NO: 1222 - RNA, 19 nt, Artificial Sequence
  Description of Artificial Sequence: Synthetic oligonucleotide
ccaucucugagcaaaauau

SEQ ID NO: 1223 - RNA, 19 nt, Artificial Sequence
  Description of Artificial Sequence: Synthetic oligonucleotide
uccagagagcuaaucucuu

SEQ ID NO: 1224 - RNA, 19 nt, Artificial Sequence
  Description of Artificial Sequence: Synthetic oligonucleotide
ucaauaagcugguuacuga

SEQ ID NO: 1225 - RNA, 19 nt, Artificial Sequence
  Description of Artificial Sequence: Synthetic oligonucleotide
agcugagaggccucaguga

SEQ ID NO: 1226 - RNA, 19 nt, Artificial Sequence
  Description of Artificial Sequence: Synthetic oligonucleotide
augaagcagucacaucucu

SEQ ID NO: 1227 - RNA, 19 nt, Artificial Sequence
  Description of Artificial Sequence: Synthetic oligonucleotide
ucuugccacagcugauuga

SEQ ID NO: 1228 - RNA, 19 nt, Artificial Sequence
  Description of Artificial Sequence: Synthetic oligonucleotide
agguguccagccccaucac

SEQ ID NO: 1229 - RNA, 19 nt, Artificial Sequence
  Description of Artificial Sequence: Synthetic oligonucleotide
cuuuacaagccuugguuca

SEQ ID NO: 1230 - RNA, 19 nt, Artificial Sequence
  Description of Artificial Sequence: Synthetic oligonucleotide
aguguggacagccucagug

SEQ ID NO: 1231 - RNA, 19 nt, Artificial Sequence
  Description of Artificial Sequence: Synthetic oligonucleotide
gcuccacucacauccucca

SEQ ID NO: 1232 - RNA, 19 nt, Artificial Sequence
  Description of Artificial Sequence: Synthetic oligonucleotide
aguggcugaaacgugugca

SEQ ID NO: 1233 - RNA, 19 nt, Artificial Sequence
  Description of Artificial Sequence: Synthetic oligonucleotide
augccaacccccuucugau

SEQ ID NO: 1234 - RNA, 19 nt, Artificial Sequence
  Description of Artificial Sequence: Synthetic oligonucleotide
uagauguggucaccuaccu

SEQ ID NO: 1235 - RNA, 19 nt, Artificial Sequence
  Description of Artificial Sequence: Synthetic oligonucleotide
ugguggcccugauccccga

SEQ ID NO: 1236 - RNA, 19 nt, Artificial Sequence
  Description of Artificial Sequence: Synthetic oligonucleotide
agcccucagcacagcagcu

SEQ ID NO: 1237 - RNA, 19 nt, Artificial Sequence
  Description of Artificial Sequence: Synthetic oligonucleotide
ugcgagagaucuucaacau

SEQ ID NO: 1238 - RNA, 19 nt, Artificial Sequence
  Description of Artificial Sequence: Synthetic oligonucleotide
uggcgagggaucagcgcag

SEQ ID NO: 1239 - RNA, 19 nt, Artificial Sequence
  Description of Artificial Sequence: Synthetic oligonucleotide
gccgagccaccuuguaugc

SEQ ID NO: 1240 - RNA, 19 nt, Artificial Sequence
  Description of Artificial Sequence: Synthetic oligonucleotide
cgcugagccacgcggucaa

SEQ ID NO: 1241 - RNA, 19 nt, Artificial Sequence
  Description of Artificial Sequence: Synthetic oligonucleotide
acaacuaucauaagacaaa

SEQ ID NO: 1242 - RNA, 19 nt, Artificial Sequence
  Description of Artificial Sequence: Synthetic oligonucleotide
acccuacagggacccagga

SEQ ID NO: 1243 - RNA, 19 nt, Artificial Sequence
  Description of Artificial Sequence: Synthetic oligonucleotide
agcugcuggacauugcuaa

SEQ ID NO: 1244 - RNA, 19 nt, Artificial Sequence
  Description of Artificial Sequence: Synthetic oligonucleotide
auuaccugauggaacagau

SEQ ID NO: 1245 - RNA, 19 nt, Artificial Sequence
  Description of Artificial Sequence: Synthetic oligonucleotide
uucaagaugacugcacugg

SEQ ID NO: 1246 - RNA, 19 nt, Artificial Sequence
  Description of Artificial Sequence: Synthetic oligonucleotide
gggaugaagauuacaccua

SEQ ID NO: 1247 - RNA, 19 nt, Artificial Sequence
  Description of Artificial Sequence: Synthetic oligonucleotide
auuugauucugcgggucau

SEQ ID NO: 1248 - RNA, 19 nt, Artificial Sequence
  Description of Artificial Sequence: Synthetic oligonucleotide
uuggaaauaugggccaaac

SEQ ID NO: 1249 - RNA, 19 nt, Artificial Sequence
  Description of Artificial Sequence: Synthetic oligonucleotide
ccauggagcaguuaacucc

SEQ ID NO: 1250 - RNA, 19 nt, Artificial Sequence
  Description of Artificial Sequence: Synthetic oligonucleotide
cagaacucaagucuucaau

SEQ ID NO: 1251 - RNA, 19 nt, Artificial Sequence
  Description of Artificial Sequence: Synthetic oligonucleotide
uccugaaauguguccaaag

SEQ ID NO: 1252 - RNA, 19 nt, Artificial Sequence
  Description of Artificial Sequence: Synthetic oligonucleotide
guacaaagccaucacugau

SEQ ID NO: 1253 - RNA, 19 nt, Artificial Sequence
  Description of Artificial Sequence: Synthetic oligonucleotide
ugauccagaaagcugccau

SEQ ID NO: 1254 - RNA, 19 nt, Artificial Sequence
  Description of Artificial Sequence: Synthetic oligonucleotide
uccaggcucugcggaaaau

SEQ ID NO: 1255 - RNA, 19 nt, Artificial Sequence
  Description of Artificial Sequence: Synthetic oligonucleotide
uggagccuaaagacaagga

SEQ ID NO: 1256 - RNA, 19 nt, Artificial Sequence
  Description of Artificial Sequence: Synthetic oligonucleotide
accaggagguucuucuuca

SEQ ID NO: 1257 - RNA, 19 nt, Artificial Sequence
  Description of Artificial Sequence: Synthetic oligonucleotide
agacuuuccuugaugaugc

SEQ ID NO: 1258 - RNA, 19 nt, Artificial Sequence
  Description of Artificial Sequence: Synthetic oligonucleotide
cuucuccgggagauaagcg

SEQ ID NO: 1259 - RNA, 19 nt, Artificial Sequence
  Description of Artificial Sequence: Synthetic oligonucleotide
gacuggcugccuaucuuau

SEQ ID NO: 1260 - RNA, 19 nt, Artificial Sequence
  Description of Artificial Sequence: Synthetic oligonucleotide
uguugaugaggaguccuuc

SEQ ID NO: 1261 - RNA, 19 nt, Artificial Sequence
  Description of Artificial Sequence: Synthetic oligonucleotide
cacaggcagauauuaacaa

SEQ ID NO: 1262 - RNA, 19 nt, Artificial Sequence
  Description of Artificial Sequence: Synthetic oligonucleotide
aaauuguccaaauucuacc

SEQ ID NO: 1263 - RNA, 19 nt, Artificial Sequence
  Description of Artificial Sequence: Synthetic oligonucleotide
caugggaacagaaugagca

SEQ ID NO: 1264 - RNA, 19 nt, Artificial Sequence
  Description of Artificial Sequence: Synthetic oligonucleotide
aagugaagaacuuuguggc

SEQ ID NO: 1265 - RNA, 19 nt, Artificial Sequence
  Description of Artificial Sequence: Synthetic oligonucleotide
cuucccauauugccaauau

SEQ ID NO: 1266 - RNA, 19 nt, Artificial Sequence
  Description of Artificial Sequence: Synthetic oligonucleotide
ucuugaacucagaagaauu

SEQ ID NO: 1267 - RNA, 19 nt, Artificial Sequence
  Description of Artificial Sequence: Synthetic oligonucleotide
uggauauccaagaucugaa

SEQ ID NO: 1268 - RNA, 19 nt, Artificial Sequence
  Description of Artificial Sequence: Synthetic oligonucleotide
aaaaguuagugaaagaagc

SEQ ID NO: 1269 - RNA, 19 nt, Artificial Sequence
  Description of Artificial Sequence: Synthetic oligonucleotide
cucugaaagaaucucaacu

SEQ ID NO: 1270 - RNA, 19 nt, Artificial Sequence
  Description of Artificial Sequence: Synthetic oligonucleotide
uuccaacugucauggacuu

SEQ ID NO: 1271 - RNA, 19 nt, Artificial Sequence
  Description of Artificial Sequence: Synthetic oligonucleotide
ucagaaaauucucucggaa

SEQ ID NO: 1272 - RNA, 19 nt, Artificial Sequence
  Description of Artificial Sequence: Synthetic oligonucleotide
acuaucaacucuacaaauc

SEQ ID NO: 1273 - RNA, 19 nt, Artificial Sequence
  Description of Artificial Sequence: Synthetic oligonucleotide
cuguuucucuuccaucacu

SEQ ID NO: 1274 - RNA, 19 nt, Artificial Sequence
  Description of Artificial Sequence: Synthetic oligonucleotide
uugacccagccucagccaa

SEQ ID NO: 1275 - RNA, 19 nt, Artificial Sequence
  Description of Artificial Sequence: Synthetic oligonucleotide
aaauagaagggaaucuuau

SEQ ID NO: 1276 - RNA, 19 nt, Artificial Sequence
  Description of Artificial Sequence: Synthetic oligonucleotide
uauuugauccaaauaacua

SEQ ID NO: 1277 - RNA, 19 nt, Artificial Sequence
  Description of Artificial Sequence: Synthetic oligonucleotide
accuuccuaaagaaagcau

SEQ ID NO: 1278 - RNA, 19 nt, Artificial Sequence
  Description of Artificial Sequence: Synthetic oligonucleotide
ugcugaaaacuacccucac

SEQ ID NO: 1279 - RNA, 19 nt, Artificial Sequence
  Description of Artificial Sequence: Synthetic oligonucleotide
cugccuuuggauuugcuuc

SEQ ID NO: 1280 - RNA, 19 nt, Artificial Sequence
  Description of Artificial Sequence: Synthetic oligonucleotide
cagcugaccucaucgagau

SEQ ID NO: 1281 - RNA, 19 nt, Artificial Sequence
  Description of Artificial Sequence: Synthetic oligonucleotide
uuggcuuggaaggaaaagg

SEQ ID NO: 1282 - RNA, 19 nt, Artificial Sequence
  Description of Artificial Sequence: Synthetic oligonucleotide
gcuuugagccaacauugga

SEQ ID NO: 1283 - RNA, 19 nt, Artificial Sequence
  Description of Artificial Sequence: Synthetic oligonucleotide
aagcucuuuuugggaagca

SEQ ID NO: 1284 - RNA, 19 nt, Artificial Sequence
  Description of Artificial Sequence: Synthetic oligonucleotide
aaggauuuuucccagacag

SEQ ID NO: 1285 - RNA, 19 nt, Artificial Sequence
  Description of Artificial Sequence: Synthetic oligonucleotide
gugucaacaaagcuuugua

SEQ ID NO: 1286 - RNA, 19 nt, Artificial Sequence
  Description of Artificial Sequence: Synthetic oligonucleotide
acuggguuaauggucaagu

SEQ ID NO: 1287 - RNA, 19 nt, Artificial Sequence
  Description of Artificial Sequence: Synthetic oligonucleotide
uuccugauggugucucuaa

SEQ ID NO: 1288 - RNA, 19 nt, Artificial Sequence
  Description of Artificial Sequence: Synthetic oligonucleotide
aggucuuaguggaccacuu

SEQ ID NO: 1289 - RNA, 19 nt, Artificial Sequence
  Description of Artificial Sequence: Synthetic oligonucleotide
uuggcuauaccaaagauga

SEQ ID NO: 1290 - RNA, 19 nt, Artificial Sequence
  Description of Artificial Sequence: Synthetic oligonucleotide
auaaacaugagcaggauau

SEQ ID NO: 1291 - RNA, 19 nt, Artificial Sequence
  Description of Artificial Sequence: Synthetic oligonucleotide
ugguaaauggaauaaugcu

SEQ ID NO: 1292 - RNA, 19 nt, Artificial Sequence
  Description of Artificial Sequence: Synthetic oligonucleotide
ucaguguugagaagcugau

SEQ ID NO: 1293 - RNA, 19 nt, Artificial Sequence
  Description of Artificial Sequence: Synthetic oligonucleotide
uuaaagauuugaaauccaa

SEQ ID NO: 1294 - RNA, 19 nt, Artificial Sequence
  Description of Artificial Sequence: Synthetic oligonucleotide
aagaagucccggaagccag

SEQ ID NO: 1295 - RNA, 19 nt, Artificial Sequence
  Description of Artificial Sequence: Synthetic oligonucleotide
gagccuaccuccgcaucuu

SEQ ID NO: 1296 - RNA, 19 nt, Artificial Sequence
  Description of Artificial Sequence: Synthetic oligonucleotide
ugggagaggagcuugguuu

SEQ ID NO: 1297 - RNA, 19 nt, Artificial Sequence
  Description of Artificial Sequence: Synthetic oligonucleotide
uugccagucuccaugaccu

SEQ ID NO: 1298 - RNA, 19 nt, Artificial Sequence
  Description of Artificial Sequence: Synthetic oligonucleotide
uccagcuccugggaaagcu

SEQ ID NO: 1299 - RNA, 19 nt, Artificial Sequence
  Description of Artificial Sequence: Synthetic oligonucleotide
ugcuucugaugggugcccg

SEQ ID NO: 1300 - RNA, 19 nt, Artificial Sequence
  Description of Artificial Sequence: Synthetic oligonucleotide
gcacucugcaggggauccc

SEQ ID NO: 1301 - RNA, 19 nt, Artificial Sequence
  Description of Artificial Sequence: Synthetic oligonucleotide
cccagaugauuggagaggu

SEQ ID NO: 1302 - RNA, 19 nt, Artificial Sequence
  Description of Artificial Sequence: Synthetic oligonucleotide
ucaucaggaagggcucaaa

SEQ ID NO: 1303 - RNA, 19 nt, Artificial Sequence
  Description of Artificial Sequence: Synthetic oligonucleotide
agaaugacuuuuuucuuca

SEQ ID NO: 1304 - RNA, 19 nt, Artificial Sequence
  Description of Artificial Sequence: Synthetic oligonucleotide
acuacaucuucauggagaa

SEQ ID NO: 1305 - RNA, 19 nt, Artificial Sequence
  Description of Artificial Sequence: Synthetic oligonucleotide
augccuuugaacuccccac

SEQ ID NO: 1306 - RNA, 19 nt, Artificial Sequence
  Description of Artificial Sequence: Synthetic oligonucleotide
cuggagcuggauuacaguu

SEQ ID NO: 1307 - RNA, 19 nt, Artificial Sequence
  Description of Artificial Sequence: Synthetic oligonucleotide
ugcaaauaucuucaucugg

SEQ ID NO: 1308 - RNA, 19 nt, Artificial Sequence
  Description of Artificial Sequence: Synthetic oligonucleotide
gagucauugcucccggagc

SEQ ID NO: 1309 - RNA, 19 nt, Artificial Sequence
  Description of Artificial Sequence: Synthetic oligonucleotide
ccaaggcuggaguaaaacu

SEQ ID NO: 1310 - RNA, 19 nt, Artificial Sequence
  Description of Artificial Sequence: Synthetic oligonucleotide
uggaaguagccaacaugca

SEQ ID NO: 1311 - RNA, 19 nt, Artificial Sequence
  Description of Artificial Sequence: Synthetic oligonucleotide
aggcugaacugguggcaaa

SEQ ID NO: 1312 - RNA, 19 nt, Artificial Sequence
  Description of Artificial Sequence: Synthetic oligonucleotide
aacccuccgugucugugga

SEQ ID NO: 1313 - RNA, 19 nt, Artificial Sequence
  Description of Artificial Sequence: Synthetic oligonucleotide
aguuugugacaaauauggg

SEQ ID NO: 1314 - RNA, 19 nt, Artificial Sequence
  Description of Artificial Sequence: Synthetic oligonucleotide
gcaucaucauuccggacuu

SEQ ID NO: 1315 - RNA, 19 nt, Artificial Sequence
  Description of Artificial Sequence: Synthetic oligonucleotide
ucgcuaggaguggggucca

SEQ ID NO: 1316 - RNA, 19 nt, Artificial Sequence
  Description of Artificial Sequence: Synthetic oligonucleotide
agaugaacaccaacuucuu

SEQ ID NO: 1317 - RNA, 19 nt, Artificial Sequence
  Description of Artificial Sequence: Synthetic oligonucleotide
uccacgagucgggucugga

SEQ ID NO: 1318 - RNA, 19 nt, Artificial Sequence
  Description of Artificial Sequence: Synthetic oligonucleotide
aggcucauguugcccuaaa

SEQ ID NO: 1319 - RNA, 19 nt, Artificial Sequence
  Description of Artificial Sequence: Synthetic oligonucleotide
aagcugggaagcugaaguu

SEQ ID NO: 1320 - RNA, 19 nt, Artificial Sequence
  Description of Artificial Sequence: Synthetic oligonucleotide
uuaucauuccuuccccaaa

SEQ ID NO: 1321 - RNA, 19 nt, Artificial Sequence
  Description of Artificial Sequence: Synthetic oligonucleotide
agagaccagucaagcugcu

SEQ ID NO: 1322 - RNA, 19 nt, Artificial Sequence
  Description of Artificial Sequence: Synthetic oligonucleotide
ucaguggaggcaacacauu

SEQ ID NO: 1323 - RNA, 19 nt, Artificial Sequence
  Description of Artificial Sequence: Synthetic oligonucleotide
uacauuuggucucuaccac

SEQ ID NO: 1324 - RNA, 19 nt, Artificial Sequence
  Description of Artificial Sequence: Synthetic oligonucleotide
ccaaaacggaggugauccc

SEQ ID NO: 1325 - RNA, 19 nt, Artificial Sequence
  Description of Artificial Sequence: Synthetic oligonucleotide
caccucucauugagaacag

SEQ ID NO: 1326 - RNA, 19 nt, Artificial Sequence
  Description of Artificial Sequence: Synthetic oligonucleotide
ggcaguccuggucaguuug

SEQ ID NO: 1327 - RNA, 19 nt, Artificial Sequence
  Description of Artificial Sequence: Synthetic oligonucleotide
gcaagcaagucuuuccugg

SEQ ID NO: 1328 - RNA, 19 nt, Artificial Sequence
  Description of Artificial Sequence: Synthetic oligonucleotide
gccugaauuacugcaccuc

SEQ ID NO: 1329 - RNA, 19 nt, Artificial Sequence
  Description of Artificial Sequence: Synthetic oligonucleotide
caggcgcuuacuccaacgc

SEQ ID NO: 1330 - RNA, 19 nt, Artificial Sequence
  Description of Artificial Sequence: Synthetic oligonucleotide
ccagcuccacagacuccgc

SEQ ID NO: 1331 - RNA, 19 nt, Artificial Sequence
  Description of Artificial Sequence: Synthetic oligonucleotide
ccuccuacuauccgcugac

SEQ ID NO: 1332 - RNA, 19 nt, Artificial Sequence
  Description of Artificial Sequence: Synthetic oligonucleotide
ccggggacaccagauuaga

SEQ ID NO: 1333 - RNA, 19 nt, Artificial Sequence
  Description of Artificial Sequence: Synthetic oligonucleotide
agcuggaacugaggccuac

SEQ ID NO: 1334 - RNA, 19 nt, Artificial Sequence
  Description of Artificial Sequence: Synthetic oligonucleotide
caggagagauugagcagua

SEQ ID NO: 1335 - RNA, 19 nt, Artificial Sequence
  Description of Artificial Sequence: Synthetic oligonucleotide
auucugucagcgcaaccua

SEQ ID NO: 1336 - RNA, 19 nt, Artificial Sequence
  Description of Artificial Sequence: Synthetic oligonucleotide
augagcuccagagagagga

SEQ ID NO: 1337 - RNA, 19 nt, Artificial Sequence
  Description of Artificial Sequence: Synthetic oligonucleotide
acagagccuugguggauac

SEQ ID NO: 1338 - RNA, 19 nt, Artificial Sequence
  Description of Artificial Sequence: Synthetic oligonucleotide
cccugaaguuuguaacuca

SEQ ID NO: 1339 - RNA, 19 nt, Artificial Sequence
  Description of Artificial Sequence: Synthetic oligonucleotide
aagcagaaggugcgaagca

SEQ ID NO: 1340 - RNA, 19 nt, Artificial Sequence
  Description of Artificial Sequence: Synthetic oligonucleotide
agacugaggcuaccaugac

SEQ ID NO: 1341 - RNA, 19 nt, Artificial Sequence
  Description of Artificial Sequence: Synthetic oligonucleotide
cauucaaauauaaucggca

SEQ ID NO: 1342 - RNA, 19 nt, Artificial Sequence
  Description of Artificial Sequence: Synthetic oligonucleotide
agaguaugaccuuguccag

SEQ ID NO: 1343 - RNA, 19 nt, Artificial Sequence
  Description of Artificial Sequence: Synthetic oligonucleotide
gugaaguccaaauuccgga

SEQ ID NO: 1344 - RNA, 19 nt, Artificial Sequence
  Description of Artificial Sequence: Synthetic oligonucleotide
auuuugauguugaccucgg

SEQ ID NO: 1345 - RNA, 19 nt, Artificial Sequence
  Description of Artificial Sequence: Synthetic oligonucleotide
gaacaauccucagaguuaa

SEQ ID NO: 1346 - RNA, 19 nt, Artificial Sequence
  Description of Artificial Sequence: Synthetic oligonucleotide
augaugaaucuacugaggg

SEQ ID NO: 1347 - RNA, 19 nt, Artificial Sequence
  Description of Artificial Sequence: Synthetic oligonucleotide
gcaaaacgucuuacagacu

SEQ ID NO: 1348 - RNA, 19 nt, Artificial Sequence
  Description of Artificial Sequence: Synthetic oligonucleotide
ucacccuggacauucagaa

SEQ ID NO: 1349 - RNA, 19 nt, Artificial Sequence
  Description of Artificial Sequence: Synthetic oligonucleotide
acaagaaaauuacugaggu

SEQ ID NO: 1350 - RNA, 19 nt, Artificial Sequence
  Description of Artificial Sequence: Synthetic oligonucleotide
ucgcccucaugggccaccu

SEQ ID NO: 1351 - RNA, 19 nt, Artificial Sequence
  Description of Artificial Sequence: Synthetic oligonucleotide
uaaguugugacacaaagga

SEQ ID NO: 1352 - RNA, 19 nt, Artificial Sequence
  Description of Artificial Sequence: Synthetic oligonucleotide
aagaaagaaaaaucaaggg

SEQ ID NO: 1353 - RNA, 19 nt, Artificial Sequence
  Description of Artificial Sequence: Synthetic oligonucleotide
guguuauuuccauaccccg

SEQ ID NO: 1354 - RNA, 19 nt, Artificial Sequence
  Description of Artificial Sequence: Synthetic oligonucleotide
guuugcaagcagaagccag

SEQ ID NO: 1355 - RNA, 19 nt, Artificial Sequence
  Description of Artificial Sequence: Synthetic oligonucleotide
gaagugagauccucgccca

SEQ ID NO: 1356 - RNA, 19 nt, Artificial Sequence
  Description of Artificial Sequence: Synthetic oligonucleotide
acuggucgccugccaaacu

SEQ ID NO: 1357 - RNA, 19 nt, Artificial Sequence
  Description of Artificial Sequence: Synthetic oligonucleotide
ugcuucuccaaauggacuc

SEQ ID NO: 1358 - RNA, 19 nt, Artificial Sequence
  Description of Artificial Sequence: Synthetic oligonucleotide
caucugcuacagcuuaugg

SEQ ID NO: 1359 - RNA, 19 nt, Artificial Sequence
  Description of Artificial Sequence: Synthetic oligonucleotide
gcuccacaguuuccaagag

SEQ ID NO: 1360 - RNA, 19 nt, Artificial Sequence
  Description of Artificial Sequence: Synthetic oligonucleotide
ggguggcauggcauuauga

SEQ ID NO: 1361 - RNA, 19 nt, Artificial Sequence
  Description of Artificial Sequence: Synthetic oligonucleotide
augaagagaagauugaauu

SEQ ID NO: 1362 - RNA, 19 nt, Artificial Sequence
  Description of Artificial Sequence: Synthetic oligonucleotide
uugaauggaacacaggcac

SEQ ID NO: 1363 - RNA, 19 nt, Artificial Sequence
  Description of Artificial Sequence: Synthetic oligonucleotide
ccaauguagauaccaaaaa

SEQ ID NO: 1364 - RNA, 19 nt, Artificial Sequence
  Description of Artificial Sequence: Synthetic oligonucleotide
aaaugacuuccaauuuccc

SEQ ID NO: 1365 - RNA, 19 nt, Artificial Sequence
  Description of Artificial Sequence: Synthetic oligonucleotide
cuguggaucucuccgauua

SEQ ID NO: 1366 - RNA, 19 nt, Artificial Sequence
  Description of Artificial Sequence: Synthetic oligonucleotide
auccuaagagcuugcauau

SEQ ID NO: 1367 - RNA, 19 nt, Artificial Sequence
  Description of Artificial Sequence: Synthetic oligonucleotide
uguaugcuaauagacuccu

SEQ ID NO: 1368 - RNA, 19 nt, Artificial Sequence
  Description of Artificial Sequence: Synthetic oligonucleotide
uggaucacagagucccuca

SEQ ID NO: 1369 - RNA, 19 nt, Artificial Sequence
  Description of Artificial Sequence: Synthetic oligonucleotide
aaacagacaugacuuuccg

SEQ ID NO: 1370 - RNA, 19 nt, Artificial Sequence
  Description of Artificial Sequence: Synthetic oligonucleotide
ggcacguggguuccaaauu

SEQ ID NO: 1371 - RNA, 19 nt, Artificial Sequence
  Description of Artificial Sequence: Synthetic oligonucleotide
uaauaguugcaaugagcuc

SEQ ID NO: 1372 - RNA, 19 nt, Artificial Sequence
  Description of Artificial Sequence: Synthetic oligonucleotide
cauggcuucagaaggcauc

SEQ ID NO: 1373 - RNA, 19 nt, Artificial Sequence
  Description of Artificial Sequence: Synthetic oligonucleotide
cugggagucuuccuuauac

SEQ ID NO: 1374 - RNA, 19 nt, Artificial Sequence
  Description of Artificial Sequence: Synthetic oligonucleotide
cccagacuuugcaagacca

SEQ ID NO: 1375 - RNA, 19 nt, Artificial Sequence
  Description of Artificial Sequence: Synthetic oligonucleotide
accucaauagccugaagga

SEQ ID NO: 1376 - RNA, 19 nt, Artificial Sequence
  Description of Artificial Sequence: Synthetic oligonucleotide
aguucaaccuccagaacau

SEQ ID NO: 1377 - RNA, 19 nt, Artificial Sequence
  Description of Artificial Sequence: Synthetic oligonucleotide
ugggauugccagacuucca

SEQ ID NO: 1378 - RNA, 19 nt, Artificial Sequence
  Description of Artificial Sequence: Synthetic oligonucleotide
acaucccagaaaaccucuu

SEQ ID NO: 1379 - RNA, 19 nt, Artificial Sequence
  Description of Artificial Sequence: Synthetic oligonucleotide
ucuuaaaaagcgauggccg

SEQ ID NO: 1380 - RNA, 19 nt, Artificial Sequence
  Description of Artificial Sequence: Synthetic oligonucleotide
gggucaaauauaccuugaa

SEQ ID NO: 1381 - RNA, 19 nt, Artificial Sequence
  Description of Artificial Sequence: Synthetic oligonucleotide
acaagaacaguuugaaaau

SEQ ID NO: 1382 - RNA, 19 nt, Artificial Sequence
  Description of Artificial Sequence: Synthetic oligonucleotide
uugagauuccuuugccuuu

SEQ ID NO: 1383 - RNA, 19 nt, Artificial Sequence
  Description of Artificial Sequence: Synthetic oligonucleotide
uugguggcaaauccuccag

SEQ ID NO: 1384 - RNA, 19 nt, Artificial Sequence
  Description of Artificial Sequence: Synthetic oligonucleotide
gagaucuaaagauguuaga

SEQ ID NO: 1385 - RNA, 19 nt, Artificial Sequence
  Description of Artificial Sequence: Synthetic oligonucleotide
agacuguuaggacaccagc

SEQ ID NO: 1386 - RNA, 19 nt, Artificial Sequence
  Description of Artificial Sequence: Synthetic oligonucleotide
cccuccacuucaagucugu

SEQ ID NO: 1387 - RNA, 19 nt, Artificial Sequence
  Description of Artificial Sequence: Synthetic oligonucleotide
ugggauuccaucugccauc

SEQ ID NO: 1388 - RNA, 19 nt, Artificial Sequence
  Description of Artificial Sequence: Synthetic oligonucleotide
cucgagaguuccaaguccc

SEQ ID NO: 1389 - RNA, 19 nt, Artificial Sequence
  Description of Artificial Sequence: Synthetic oligonucleotide
cuacuuuuaccauucccaa

SEQ ID NO: 1390 - RNA, 19 nt, Artificial Sequence
  Description of Artificial Sequence: Synthetic oligonucleotide
aguuguaucaacugcaagu

SEQ ID NO: 1391 - RNA, 19 nt, Artificial Sequence
  Description of Artificial Sequence: Synthetic oligonucleotide
ugccucuccuggguguucu

SEQ ID NO: 1392 - RNA, 19 nt, Artificial Sequence
  Description of Artificial Sequence: Synthetic oligonucleotide
uagaccucuccacgaaugu

SEQ ID NO: 1393 - RNA, 19 nt, Artificial Sequence
  Description of Artificial Sequence: Synthetic oligonucleotide
ucuacagcaacuuguacaa

SEQ ID NO: 1394 - RNA, 19 nt, Artificial Sequence
  Description of Artificial Sequence: Synthetic oligonucleotide
acugguccgccuccuacag

SEQ ID NO: 1395 - RNA, 19 nt, Artificial Sequence
  Description of Artificial Sequence: Synthetic oligonucleotide
gugguggcaacaccagcac

SEQ ID NO: 1396 - RNA, 19 nt, Artificial Sequence
  Description of Artificial Sequence: Synthetic oligonucleotide
cagaccauuucagccuucg

SEQ ID NO: 1397 - RNA, 19 nt, Artificial Sequence
  Description of Artificial Sequence: Synthetic oligonucleotide
gggcucguuaccacaugaa

SEQ ID NO: 1398 - RNA, 19 nt, Artificial Sequence
  Description of Artificial Sequence: Synthetic oligonucleotide
aggcugacucugugguuga

SEQ ID NO: 1399 - RNA, 19 nt, Artificial Sequence
  Description of Artificial Sequence: Synthetic oligonucleotide
accugcuuuccuacaaugu

SEQ ID NO: 1400 - RNA, 19 nt, Artificial Sequence
  Description of Artificial Sequence: Synthetic oligonucleotide
ugcaaggaucuggagaaac

SEQ ID NO: 1401 - RNA, 19 nt, Artificial Sequence
  Description of Artificial Sequence: Synthetic oligonucleotide
caacauaugaccacaagaa

SEQ ID NO: 1402 - RNA, 19 nt, Artificial Sequence
  Description of Artificial Sequence: Synthetic oligonucleotide
auacguucacacuaucaug

SEQ ID NO: 1403 - RNA, 19 nt, Artificial Sequence
  Description of Artificial Sequence: Synthetic oligonucleotide
gugaugggucucuacgcca

SEQ ID NO: 1404 - RNA, 19 nt, Artificial Sequence
  Description of Artificial Sequence: Synthetic oligonucleotide
acaaauuucuagauucgaa

SEQ ID NO: 1405 - RNA, 19 nt, Artificial Sequence
  Description of Artificial Sequence: Synthetic oligonucleotide
auaucaaauucagucaugu

SEQ ID NO: 1406 - RNA, 19 nt, Artificial Sequence
  Description of Artificial Sequence: Synthetic oligonucleotide
uagaaaaacuuggaaacaa

SEQ ID NO: 1407 - RNA, 19 nt, Artificial Sequence
  Description of Artificial Sequence: Synthetic oligonucleotide
acccagucucaaaagguuu

SEQ ID NO: 1408 - RNA, 19 nt, Artificial Sequence
  Description of Artificial Sequence: Synthetic oligonucleotide
uacuaauauucgaugcauc

SEQ ID NO: 1409 - RNA, 19 nt, Artificial Sequence
  Description of Artificial Sequence: Synthetic oligonucleotide
cuaguuccuggggaccaca

SEQ ID NO: 1410 - RNA, 19 nt, Artificial Sequence
  Description of Artificial Sequence: Synthetic oligonucleotide
agaugucugcuucaguuca

SEQ ID NO: 1411 - RNA, 19 nt, Artificial Sequence
  Description of Artificial Sequence: Synthetic oligonucleotide
auuuggacuccaaaaagaa

SEQ ID NO: 1412 - RNA, 19 nt, Artificial Sequence
  Description of Artificial Sequence: Synthetic oligonucleotide
aacagcauuuguuugucaa

SEQ ID NO: 1413 - RNA, 19 nt, Artificial Sequence
  Description of Artificial Sequence: Synthetic oligonucleotide
aagaagucaagauugaugg

SEQ ID NO: 1414 - RNA, 19 nt, Artificial Sequence
  Description of Artificial Sequence: Synthetic oligonucleotide
ggcaguucagagucucuuc

SEQ ID NO: 1415 - RNA, 19 nt, Artificial Sequence
  Description of Artificial Sequence: Synthetic oligonucleotide
cguucuaugcuaaaggcac

SEQ ID NO: 1416 - RNA, 19 nt, Artificial Sequence
  Description of Artificial Sequence: Synthetic oligonucleotide
cauauggccugucuuguca

SEQ ID NO: 1417 - RNA, 19 nt, Artificial Sequence
  Description of Artificial Sequence: Synthetic oligonucleotide
agagggauccuaacacugg

SEQ ID NO: 1418 - RNA, 19 nt, Artificial Sequence
  Description of Artificial Sequence: Synthetic oligonucleotide
gccggcucaauggagaguc

SEQ ID NO: 1419 - RNA, 19 nt, Artificial Sequence
  Description of Artificial Sequence: Synthetic oligonucleotide
ccaaccugagguuuaacuc

SEQ ID NO: 1420 - RNA, 19 nt, Artificial Sequence
  Description of Artificial Sequence: Synthetic oligonucleotide
ccuccuaccuccaaggcac

SEQ ID NO: 1421 - RNA, 19 nt, Artificial Sequence
  Description of Artificial Sequence: Synthetic oligonucleotide
ccaaccagauaacaggaag

SEQ ID NO: 1422 - RNA, 19 nt, Artificial Sequence
  Description of Artificial Sequence: Synthetic oligonucleotide
gauaugaagauggaacccu

SEQ ID NO: 1423 - RNA, 19 nt, Artificial Sequence
  Description of Artificial Sequence: Synthetic oligonucleotide
ucucccucaccuccaccuc

SEQ ID NO: 1424 - RNA, 19 nt, Artificial Sequence
  Description of Artificial Sequence: Synthetic oligonucleotide
cugaucugcaaaguggcau

SEQ ID NO: 1425 - RNA, 19 nt, Artificial Sequence
  Description of Artificial Sequence: Synthetic oligonucleotide
ucauuaaaaauacugcuuc

SEQ ID NO: 1426 - RNA, 19 nt, Artificial Sequence
  Description of Artificial Sequence: Synthetic oligonucleotide
cccuaaaguaugagaacua

SEQ ID NO: 1427 - RNA, 19 nt, Artificial Sequence
  Description of Artificial Sequence: Synthetic oligonucleotide
acgagcugacuuuaaaauc

SEQ ID NO: 1428 - RNA, 19 nt, Artificial Sequence
  Description of Artificial Sequence: Synthetic oligonucleotide
cugacaccaaugggaagua

SEQ ID NO: 1429 - RNA, 19 nt, Artificial Sequence
  Description of Artificial Sequence: Synthetic oligonucleotide
auaagaacuuugccacuuc

SEQ ID NO: 1430 - RNA, 19 nt, Artificial Sequence
  Description of Artificial Sequence: Synthetic oligonucleotide
cuaacaagauggauaugac

SEQ ID NO: 1431 - RNA, 19 nt, Artificial Sequence
  Description of Artificial Sequence: Synthetic oligonucleotide
ccuucucuaagcaaaaugc

SEQ ID NO: 1432 - RNA, 19 nt, Artificial Sequence
  Description of Artificial Sequence: Synthetic oligonucleotide
cacugcugcguucugaaua

SEQ ID NO: 1433 - RNA, 19 nt, Artificial Sequence
  Description of Artificial Sequence: Synthetic oligonucleotide
aucaggcugauuacgaguc

SEQ ID NO: 1434 - RNA, 19 nt, Artificial Sequence
  Description of Artificial Sequence: Synthetic oligonucleotide
cauugagguucuucagccu

SEQ ID NO: 1435 - RNA, 19 nt, Artificial Sequence
  Description of Artificial Sequence: Synthetic oligonucleotide
ugcuuucuggaucacuaaa

SEQ ID NO: 1436 - RNA, 19 nt, Artificial Sequence
  Description of Artificial Sequence: Synthetic oligonucleotide
auucccauggucuugaguu

SEQ ID NO: 1437 - RNA, 19 nt, Artificial Sequence
  Description of Artificial Sequence: Synthetic oligonucleotide
uaaaugcugacaucuuagg

SEQ ID NO: 1438 - RNA, 19 nt, Artificial Sequence
  Description of Artificial Sequence: Synthetic oligonucleotide
gcacugacaaaauuaauag

SEQ ID NO: 1439 - RNA, 19 nt, Artificial Sequence
  Description of Artificial Sequence: Synthetic oligonucleotide
guggugcucacaaggcgac

SEQ ID NO: 1440 - RNA, 19 nt, Artificial Sequence
  Description of Artificial Sequence: Synthetic oligonucleotide
cacuaaggauuggccaaga

SEQ ID NO: 1441 - RNA, 19 nt, Artificial Sequence
  Description of Artificial Sequence: Synthetic oligonucleotide
auggaauaucuaccagugc

SEQ ID NO: 1442 - RNA, 19 nt, Artificial Sequence
  Description of Artificial Sequence: Synthetic oligonucleotide
caacgaccaacuugaagug

SEQ ID NO: 1443 - RNA, 19 nt, Artificial Sequence
  Description of Artificial Sequence: Synthetic oligonucleotide
guagucuccuggugcugga

SEQ ID NO: 1444 - RNA, 19 nt, Artificial Sequence
  Description of Artificial Sequence: Synthetic oligonucleotide
agaaugagcugaaugcaga

SEQ ID NO: 1445 - RNA, 19 nt, Artificial Sequence
  Description of Artificial Sequence: Synthetic oligonucleotide
agcuuggccucucuggggc

SEQ ID NO: 1446 - RNA, 19 nt, Artificial Sequence
  Description of Artificial Sequence: Synthetic oligonucleotide
caucuaugaaauuaacaac

SEQ ID NO: 1447 - RNA, 19 nt, Artificial Sequence
  Description of Artificial Sequence: Synthetic oligonucleotide
caaauggccgcuucaggga

SEQ ID NO: 1448 - RNA, 19 nt, Artificial Sequence
  Description of Artificial Sequence: Synthetic oligonucleotide
aacacaaugcaaaauucag

SEQ ID NO: 1449 - RNA, 19 nt, Artificial Sequence
  Description of Artificial Sequence: Synthetic oligonucleotide
gucuggaugggaaagccgc

SEQ ID NO: 1450 - RNA, 19 nt, Artificial Sequence
  Description of Artificial Sequence: Synthetic oligonucleotide
cccucacagagcuaucacu

SEQ ID NO: 1451 - RNA, 19 nt, Artificial Sequence
  Description of Artificial Sequence: Synthetic oligonucleotide
ugggaagugcuuaucaggc

SEQ ID NO: 1452 - RNA, 19 nt, Artificial Sequence
  Description of Artificial Sequence: Synthetic oligonucleotide
ccaugauucugggugucga

SEQ ID NO: 1453 - RNA, 19 nt, Artificial Sequence
  Description of Artificial Sequence: Synthetic oligonucleotide
acagcaaaaacauuuucaa

SEQ ID NO: 1454 - RNA, 19 nt, Artificial Sequence
  Description of Artificial Sequence: Synthetic oligonucleotide
acuucaaggucagucaaga

SEQ ID NO: 1455 - RNA, 19 nt, Artificial Sequence
  Description of Artificial Sequence: Synthetic oligonucleotide
aaggacuuaagcucucaaa

SEQ ID NO: 1456 - RNA, 19 nt, Artificial Sequence
  Description of Artificial Sequence: Synthetic oligonucleotide
augacaugaugggcucaua

SEQ ID NO: 1457 - RNA, 19 nt, Artificial Sequence
  Description of Artificial Sequence: Synthetic oligonucleotide
augcugaaaugaaauuuga

SEQ ID NO: 1458 - RNA, 19 nt, Artificial Sequence
  Description of Artificial Sequence: Synthetic oligonucleotide
accacacaaacagucugaa

SEQ ID NO: 1459 - RNA, 19 nt, Artificial Sequence
  Description of Artificial Sequence: Synthetic oligonucleotide
acauugcaggcuuaucacu

SEQ ID NO: 1460 - RNA, 19 nt, Artificial Sequence
  Description of Artificial Sequence: Synthetic oligonucleotide
uggacuucucuucaaaacu

SEQ ID NO: 1461 - RNA, 19 nt, Artificial Sequence
  Description of Artificial Sequence: Synthetic oligonucleotide
uugacaacauuuacagcuc

SEQ ID NO: 1462 - RNA, 19 nt, Artificial Sequence
  Description of Artificial Sequence: Synthetic oligonucleotide
cugacaaguuuuauaagca

SEQ ID NO: 1463 - RNA, 19 nt, Artificial Sequence
  Description of Artificial Sequence: Synthetic oligonucleotide
aaacuguuaauuuacagcu

SEQ ID NO: 1464 - RNA, 19 nt, Artificial Sequence
  Description of Artificial Sequence: Synthetic oligonucleotide
uacagcccuauucucuggu

SEQ ID NO: 1465 - RNA, 19 nt, Artificial Sequence
  Description of Artificial Sequence: Synthetic oligonucleotide
uaacuacuuuaaacaguga

SEQ ID NO: 1466 - RNA, 19 nt, Artificial Sequence
  Description of Artificial Sequence: Synthetic oligonucleotide
accugaaauacaaugcucu

SEQ ID NO: 1467 - RNA, 19 nt, Artificial Sequence
  Description of Artificial Sequence: Synthetic oligonucleotide
uggaucucaccaacaaugg

SEQ ID NO: 1468 - RNA, 19 nt, Artificial Sequence
  Description of Artificial Sequence: Synthetic oligonucleotide
ggaaacuacggcuagaacc

SEQ ID NO: 1469 - RNA, 19 nt, Artificial Sequence
  Description of Artificial Sequence: Synthetic oligonucleotide
cccugaagcugcauguggc

SEQ ID NO: 1470 - RNA, 19 nt, Artificial Sequence
  Description of Artificial Sequence: Synthetic oligonucleotide
cugguaaccuaaaaggagc

SEQ ID NO: 1471 - RNA, 19 nt, Artificial Sequence
  Description of Artificial Sequence: Synthetic oligonucleotide
ccuaccaaaauaaugaaau

SEQ ID NO: 1472 - RNA, 19 nt, Artificial Sequence
  Description of Artificial Sequence: Synthetic oligonucleotide
uaaaacacaucuaugccau

SEQ ID NO: 1473 - RNA, 19 nt, Artificial Sequence
  Description of Artificial Sequence: Synthetic oligonucleotide
ucucuucugcugccuuauc

SEQ ID NO: 1474 - RNA, 19 nt, Artificial Sequence
  Description of Artificial Sequence: Synthetic oligonucleotide
cagcaagcuauaaagcaga

SEQ ID NO: 1475 - RNA, 19 nt, Artificial Sequence
  Description of Artificial Sequence: Synthetic oligonucleotide
acacuguugcuaagguuca

SEQ ID NO: 1476 - RNA, 19 nt, Artificial Sequence
  Description of Artificial Sequence: Synthetic oligonucleotide
aggguguggaguuuagcca

SEQ ID NO: 1477 - RNA, 19 nt, Artificial Sequence
  Description of Artificial Sequence: Synthetic oligonucleotide
aucggcucaacacagacau

SEQ ID NO: 1478 - RNA, 19 nt, Artificial Sequence
  Description of Artificial Sequence: Synthetic oligonucleotide
ucgcugggcuggcuucagc

SEQ ID NO: 1479 - RNA, 19 nt, Artificial Sequence
  Description of Artificial Sequence: Synthetic oligonucleotide
ccauugacaugagcacaaa

SEQ ID NO: 1480 - RNA, 19 nt, Artificial Sequence
  Description of Artificial Sequence: Synthetic oligonucleotide
acuauaauucagacucacu

SEQ ID NO: 1481 - RNA, 19 nt, Artificial Sequence
  Description of Artificial Sequence: Synthetic oligonucleotide
ugcauuucagcaaugucuu

SEQ ID NO: 1482 - RNA, 19 nt, Artificial Sequence
  Description of Artificial Sequence: Synthetic oligonucleotide
uccguucuguaauggcccc

SEQ ID NO: 1483 - RNA, 19 nt, Artificial Sequence
  Description of Artificial Sequence: Synthetic oligonucleotide
cguuuaccaugaccaucga

SEQ ID NO: 1484 - RNA, 19 nt, Artificial Sequence
  Description of Artificial Sequence: Synthetic oligonucleotide
augcacauacaaauggcaa

SEQ ID NO: 1485 - RNA, 19 nt, Artificial Sequence
  Description of Artificial Sequence: Synthetic oligonucleotide
augggaaacucgcucucug

SEQ ID NO: 1486 - RNA, 19 nt, Artificial Sequence
  Description of Artificial Sequence: Synthetic oligonucleotide
ggggagaacauacugggca

SEQ ID NO: 1487 - RNA, 19 nt, Artificial Sequence
  Description of Artificial Sequence: Synthetic oligonucleotide
agcuguauagcaaauuccu

SEQ ID NO: 1488 - RNA, 19 nt, Artificial Sequence
  Description of Artificial Sequence: Synthetic oligonucleotide
uguugaaagcagaaccucu

SEQ ID NO: 1489 - RNA, 19 nt, Artificial Sequence
  Description of Artificial Sequence: Synthetic oligonucleotide
uggcauuuacuuucucuca

SEQ ID NO: 1490 - RNA, 19 nt, Artificial Sequence
  Description of Artificial Sequence: Synthetic oligonucleotide
augauuacaaaggcuccac

SEQ ID NO: 1491 - RNA, 19 nt, Artificial Sequence
  Description of Artificial Sequence: Synthetic oligonucleotide
caagucaucaucucguguc

SEQ ID NO: 1492 - RNA, 19 nt, Artificial Sequence
  Description of Artificial Sequence: Synthetic oligonucleotide
cuaggaaaagcaucagugc

SEQ ID NO: 1493 - RNA, 19 nt, Artificial Sequence
  Description of Artificial Sequence: Synthetic oligonucleotide
cagcucuugaacacaaagu

SEQ ID NO: 1494 - RNA, 19 nt, Artificial Sequence
  Description of Artificial Sequence: Synthetic oligonucleotide
ucagugcccugcuuacucc

SEQ ID NO: 1495 - RNA, 19 nt, Artificial Sequence
  Description of Artificial Sequence: Synthetic oligonucleotide
cagcugagcagacaggcac

SEQ ID NO: 1496 - RNA, 19 nt, Artificial Sequence
  Description of Artificial Sequence: Synthetic oligonucleotide
ccuggaaacucaagaccca

SEQ ID NO: 1497 - RNA, 19 nt, Artificial Sequence
  Description of Artificial Sequence: Synthetic oligonucleotide
aauuuaacaacaaugaaua

SEQ ID NO: 1498 - RNA, 19 nt, Artificial Sequence
  Description of Artificial Sequence: Synthetic oligonucleotide
acagccaggacuuggaugc

SEQ ID NO: 1499 - RNA, 19 nt, Artificial Sequence
  Description of Artificial Sequence: Synthetic oligonucleotide
cuuacaacacuaaagauaa

SEQ ID NO: 1500 - RNA, 19 nt, Artificial Sequence
  Description of Artificial Sequence: Synthetic oligonucleotide
aaauuggcguggagcuuac

SEQ ID NO: 1501 - RNA, 19 nt, Artificial Sequence
  Description of Artificial Sequence: Synthetic oligonucleotide
cuggacgaacucuggcuga

SEQ ID NO: 1502 - RNA, 19 nt, Artificial Sequence
  Description of Artificial Sequence: Synthetic oligonucleotide
accuaacucuacuagacuc

SEQ ID NO: 1503 - RNA, 19 nt, Artificial Sequence
  Description of Artificial Sequence: Synthetic oligonucleotide
ccccaauuaaagugccacu

SEQ ID NO: 1504 - RNA, 19 nt, Artificial Sequence
  Description of Artificial Sequence: Synthetic oligonucleotide
uuuuacucagugagcccau

SEQ ID NO: 1505 - RNA, 19 nt, Artificial Sequence
  Description of Artificial Sequence: Synthetic oligonucleotide
ucaauaucauugaugcuuu

SEQ ID NO: 1506 - RNA, 19 nt, Artificial Sequence
  Description of Artificial Sequence: Synthetic oligonucleotide
uagagaugagagaugccgu

SEQ ID NO: 1507 - RNA, 19 nt, Artificial Sequence
  Description of Artificial Sequence: Synthetic oligonucleotide
uugagaagccccaagaauu

SEQ ID NO: 1508 - RNA, 19 nt, Artificial Sequence
  Description of Artificial Sequence: Synthetic oligonucleotide
uuacaauuguugcuuuugu

SEQ ID NO: 1509 - RNA, 19 nt, Artificial Sequence
  Description of Artificial Sequence: Synthetic oligonucleotide
uaaaguaugauaaaaacca

SEQ ID NO: 1510 - RNA, 19 nt, Artificial Sequence
  Description of Artificial Sequence: Synthetic oligonucleotide
aagauguucacuccauuaa

SEQ ID NO: 1511 - RNA, 19 nt, Artificial Sequence
  Description of Artificial Sequence: Synthetic oligonucleotide
accucccauuuuuugagac

SEQ ID NO: 1512 - RNA, 19 nt, Artificial Sequence
  Description of Artificial Sequence: Synthetic oligonucleotide
ccuugcaagaauauuuuga

SEQ ID NO: 1513 - RNA, 19 nt, Artificial Sequence
  Description of Artificial Sequence: Synthetic oligonucleotide
agaggaaucgacaaaccau

SEQ ID NO: 1514 - RNA, 19 nt, Artificial Sequence
  Description of Artificial Sequence: Synthetic oligonucleotide
uuauaguuguacuggaaaa

SEQ ID NO: 1515 - RNA, 19 nt, Artificial Sequence
  Description of Artificial Sequence: Synthetic oligonucleotide
acguacagagaaaccugaa

SEQ ID NO: 1516 - RNA, 19 nt, Artificial Sequence
  Description of Artificial Sequence: Synthetic oligonucleotide
agcacaucaauauugauca

SEQ ID NO: 1517 - RNA, 19 nt, Artificial Sequence
  Description of Artificial Sequence: Synthetic oligonucleotide
aauuuguaagaaaauacag

SEQ ID NO: 1518 - RNA, 19 nt, Artificial Sequence
  Description of Artificial Sequence: Synthetic oligonucleotide
gagcagcccugggaaaacu

SEQ ID NO: 1519 - RNA, 19 nt, Artificial Sequence
  Description of Artificial Sequence: Synthetic oligonucleotide
ucccacagcaagcuaauga

SEQ ID NO: 1520 - RNA, 19 nt, Artificial Sequence
  Description of Artificial Sequence: Synthetic oligonucleotide
auuaucugaauucauucaa

SEQ ID NO: 1521 - RNA, 19 nt, Artificial Sequence
  Description of Artificial Sequence: Synthetic oligonucleotide
auugggagagacaaguuuc

SEQ ID NO: 1522 - RNA, 19 nt, Artificial Sequence
  Description of Artificial Sequence: Synthetic oligonucleotide
cacaugccaaggagaaacu

SEQ ID NO: 1523 - RNA, 19 nt, Artificial Sequence
  Description of Artificial Sequence: Synthetic oligonucleotide
ugacugcucucacaaaaaa

SEQ ID NO: 1524 - RNA, 19 nt, Artificial Sequence
  Description of Artificial Sequence: Synthetic oligonucleotide
aguauagaauuacagaaaa

SEQ ID NO: 1525 - RNA, 19 nt, Artificial Sequence
  Description of Artificial Sequence: Synthetic oligonucleotide
augauauacaaauugcauu

SEQ ID NO: 1526 - RNA, 19 nt, Artificial Sequence
  Description of Artificial Sequence: Synthetic oligonucleotide
uagaugaugccaaaaucaa

SEQ ID NO: 1527 - RNA, 19 nt, Artificial Sequence
  Description of Artificial Sequence: Synthetic oligonucleotide
acuuuaaugaaaaacuauc

SEQ ID NO: 1528 - RNA, 19 nt, Artificial Sequence
  Description of Artificial Sequence: Synthetic oligonucleotide
cucaacugcagacauauau

SEQ ID NO: 1529 - RNA, 19 nt, Artificial Sequence
  Description of Artificial Sequence: Synthetic oligonucleotide
ugauacaauuugaucagua

SEQ ID NO: 1530 - RNA, 19 nt, Artificial Sequence
  Description of Artificial Sequence: Synthetic oligonucleotide
auauuaaagauaguuauga

SEQ ID NO: 1531 - RNA, 19 nt, Artificial Sequence
  Description of Artificial Sequence: Synthetic oligonucleotide
auuuacaugauuugaaaau

SEQ ID NO: 1532 - RNA, 19 nt, Artificial Sequence
  Description of Artificial Sequence: Synthetic oligonucleotide
uagcuauugcuaauauuau

SEQ ID NO: 1533 - RNA, 19 nt, Artificial Sequence
  Description of Artificial Sequence: Synthetic oligonucleotide
uugaugaaaucauugaaaa

SEQ ID NO: 1534 - RNA, 19 nt, Artificial Sequence
  Description of Artificial Sequence: Synthetic oligonucleotide
aauuaaaaagucuugauga

SEQ ID NO: 1535 - RNA, 19 nt, Artificial Sequence
  Description of Artificial Sequence: Synthetic oligonucleotide
agcacuaucauauccgugu

SEQ ID NO: 1536 - RNA, 19 nt, Artificial Sequence
  Description of Artificial Sequence: Synthetic oligonucleotide
uaaauuuaguaaaaacaau

SEQ ID NO: 1537 - RNA, 19 nt, Artificial Sequence
  Description of Artificial Sequence: Synthetic oligonucleotide
uccaugaucuacauuuguu

SEQ ID NO: 1538 - RNA, 19 nt, Artificial Sequence
  Description of Artificial Sequence: Synthetic oligonucleotide
uuauugaaaauauugauuu

SEQ ID NO: 1539 - RNA, 19 nt, Artificial Sequence
  Description of Artificial Sequence: Synthetic oligonucleotide
uuaacaaaaguggaaguag

SEQ ID NO: 1540 - RNA, 19 nt, Artificial Sequence
  Description of Artificial Sequence: Synthetic oligonucleotide
guacugcauccuggauuca

SEQ ID NO: 1541 - RNA, 19 nt, Artificial Sequence
  Description of Artificial Sequence: Synthetic oligonucleotide
aaaauguggauacuaagua

SEQ ID NO: 1542 - RNA, 19 nt, Artificial Sequence
  Description of Artificial Sequence: Synthetic oligonucleotide
accaaaucagaauccagau

SEQ ID NO: 1543 - RNA, 19 nt, Artificial Sequence
  Description of Artificial Sequence: Synthetic oligonucleotide
uacaagaaaaacugcagca

SEQ ID NO: 1544 - RNA, 19 nt, Artificial Sequence
  Description of Artificial Sequence: Synthetic oligonucleotide
agcuuaagagacacauaca

SEQ ID NO: 1545 - RNA, 19 nt, Artificial Sequence
  Description of Artificial Sequence: Synthetic oligonucleotide
agaauauagacauccagca

SEQ ID NO: 1546 - RNA, 19 nt, Artificial Sequence
  Description of Artificial Sequence: Synthetic oligonucleotide
accuagcuggaaaguuaaa

SEQ ID NO: 1547 - RNA, 19 nt, Artificial Sequence
  Description of Artificial Sequence: Synthetic oligonucleotide
aacaacacauugaggcuau

SEQ ID NO: 1548 - RNA, 19 nt, Artificial Sequence
  Description of Artificial Sequence: Synthetic oligonucleotide
uugauguuagagugcuuuu

SEQ ID NO: 1549 - RNA, 19 nt, Artificial Sequence
  Description of Artificial Sequence: Synthetic oligonucleotide
uagaucaauugggaacuac

SEQ ID NO: 1550 - RNA, 19 nt, Artificial Sequence
  Description of Artificial Sequence: Synthetic oligonucleotide
caauuucauuugaaagaau

SEQ ID NO: 1551 - RNA, 19 nt, Artificial Sequence
  Description of Artificial Sequence: Synthetic oligonucleotide
uaaaugacguucuugagca

SEQ ID NO: 1552 - RNA, 19 nt, Artificial Sequence
  Description of Artificial Sequence: Synthetic oligonucleotide
augucaaacacuuuguuau

SEQ ID NO: 1553 - RNA, 19 nt, Artificial Sequence
  Description of Artificial Sequence: Synthetic oligonucleotide
uaaaucuuauuggggauuu

SEQ ID NO: 1554 - RNA, 19 nt, Artificial Sequence
  Description of Artificial Sequence: Synthetic oligonucleotide
uugaaguagcugagaaaau

SEQ ID NO: 1555 - RNA, 19 nt, Artificial Sequence
  Description of Artificial Sequence: Synthetic oligonucleotide
ucaaugccuucagagccaa

SEQ ID NO: 1556 - RNA, 19 nt, Artificial Sequence
  Description of Artificial Sequence: Synthetic oligonucleotide
aaguccaugaguuaaucga

SEQ ID NO: 1557 - RNA, 19 nt, Artificial Sequence
  Description of Artificial Sequence: Synthetic oligonucleotide
agagguaugaaguagacca

SEQ ID NO: 1558 - RNA, 19 nt, Artificial Sequence
  Description of Artificial Sequence: Synthetic oligonucleotide
aacaaauccagguuuuaau

SEQ ID NO: 1559 - RNA, 19 nt, Artificial Sequence
  Description of Artificial Sequence: Synthetic oligonucleotide
uggauaaauuaguagaguu

SEQ ID NO: 1560 - RNA, 19 nt, Artificial Sequence
  Description of Artificial Sequence: Synthetic oligonucleotide
uggcccaccaauacaaguu

SEQ ID NO: 1561 - RNA, 19 nt, Artificial Sequence
  Description of Artificial Sequence: Synthetic oligonucleotide
ugaaggagacuauucagaa

SEQ ID NO: 1562 - RNA, 19 nt, Artificial Sequence
  Description of Artificial Sequence: Synthetic oligonucleotide
agcuaagcaauguccuaca

SEQ ID NO: 1563 - RNA, 19 nt, Artificial Sequence
  Description of Artificial Sequence: Synthetic oligonucleotide
aacaaguuaagauaaaaga

SEQ ID NO: 1564 - RNA, 19 nt, Artificial Sequence
  Description of Artificial Sequence: Synthetic oligonucleotide
auuacuuugagaaauuggu

SEQ ID NO: 1565 - RNA, 19 nt, Artificial Sequence
  Description of Artificial Sequence: Synthetic oligonucleotide
uuggauuuauugaugaugc

SEQ ID NO: 1566 - RNA, 19 nt, Artificial Sequence
  Description of Artificial Sequence: Synthetic oligonucleotide
cugucaagaagcuuaauga

SEQ ID NO: 1567 - RNA, 19 nt, Artificial Sequence
  Description of Artificial Sequence: Synthetic oligonucleotide
aauuaucuuuuaaaacauu

SEQ ID NO: 1568 - RNA, 19 nt, Artificial Sequence
  Description of Artificial Sequence: Synthetic oligonucleotide
ucauugaagauguuaacaa

SEQ ID NO: 1569 - RNA, 19 nt, Artificial Sequence
  Description of Artificial Sequence: Synthetic oligonucleotide
aauuccuugacauguugau

SEQ ID NO: 1570 - RNA, 19 nt, Artificial Sequence
  Description of Artificial Sequence: Synthetic oligonucleotide
uaaagaaauuaaagucauu

SEQ ID NO: 1571 - RNA, 19 nt, Artificial Sequence
  Description of Artificial Sequence: Synthetic oligonucleotide
uugauuaccaccaguuugu

SEQ ID NO: 1572 - RNA, 19 nt, Artificial Sequence
  Description of Artificial Sequence: Synthetic oligonucleotide
uagaugaaaccaaugacaa

SEQ ID NO: 1573 - RNA, 19 nt, Artificial Sequence
  Description of Artificial Sequence: Synthetic oligonucleotide
aaauccgugaggugacuca

SEQ ID NO: 1574 - RNA, 19 nt, Artificial Sequence
  Description of Artificial Sequence: Synthetic oligonucleotide
agagacucaauggugaaau

SEQ ID NO: 1575 - RNA, 19 nt, Artificial Sequence
  Description of Artificial Sequence: Synthetic oligonucleotide
uucaggcucuggaacuacc

SEQ ID NO: 1576 - RNA, 19 nt, Artificial Sequence
  Description of Artificial Sequence: Synthetic oligonucleotide
cacaaaaagcugaagcauu

SEQ ID NO: 1577 - RNA, 19 nt, Artificial Sequence
  Description of Artificial Sequence: Synthetic oligonucleotide
uaaaacuguuuuuagagga

SEQ ID NO: 1578 - RNA, 19 nt, Artificial Sequence
  Description of Artificial Sequence: Synthetic oligonucleotide
aaaccaaggccacaguugc

SEQ ID NO: 1579 - RNA, 19 nt, Artificial Sequence
  Description of Artificial Sequence: Synthetic oligonucleotide
caguguaucuggaaagccu

SEQ ID NO: 1580 - RNA, 19 nt, Artificial Sequence
  Description of Artificial Sequence: Synthetic oligonucleotide
uacaggacaccaaaauaac

SEQ ID NO: 1581 - RNA, 19 nt, Artificial Sequence
  Description of Artificial Sequence: Synthetic oligonucleotide
ccuuaaucaucaauugguu

SEQ ID NO: 1582 - RNA, 19 nt, Artificial Sequence
  Description of Artificial Sequence: Synthetic oligonucleotide
uacaggaggcuuuaaguuc

SEQ ID NO: 1583 - RNA, 19 nt, Artificial Sequence
  Description of Artificial Sequence: Synthetic oligonucleotide
cagcaucuuuggcucacau

SEQ ID NO: 1584 - RNA, 19 nt, Artificial Sequence
  Description of Artificial Sequence: Synthetic oligonucleotide
ugaaggccaaauuccgaga

SEQ ID NO: 1585 - RNA, 19 nt, Artificial Sequence
  Description of Artificial Sequence: Synthetic oligonucleotide
agacccuagaagauacacg

SEQ ID NO: 1586 - RNA, 19 nt, Artificial Sequence
  Description of Artificial Sequence: Synthetic oligonucleotide
gagaccgaauguaucaaau

SEQ ID NO: 1587 - RNA, 19 nt, Artificial Sequence
  Description of Artificial Sequence: Synthetic oligonucleotide
uggacauucagcaggaacu

SEQ ID NO: 1588 - RNA, 19 nt, Artificial Sequence
  Description of Artificial Sequence: Synthetic oligonucleotide
uucaacgauaccugucucu

SEQ ID NO: 1589 - RNA, 19 nt, Artificial Sequence
  Description of Artificial Sequence: Synthetic oligonucleotide
ugguaggccagguuuauag

SEQ ID NO: 1590 - RNA, 19 nt, Artificial Sequence
  Description of Artificial Sequence: Synthetic oligonucleotide
gcacacuugucaccuacau

SEQ ID NO: 1591 - RNA, 19 nt, Artificial Sequence
  Description of Artificial Sequence: Synthetic oligonucleotide
uuucugauugguggacucu

SEQ ID NO: 1592 - RNA, 19 nt, Artificial Sequence
  Description of Artificial Sequence: Synthetic oligonucleotide
uugcugcuaagaaccuuac

SEQ ID NO: 1593 - RNA, 19 nt, Artificial Sequence
  Description of Artificial Sequence: Synthetic oligonucleotide
cugacuuugcagagcaaua

SEQ ID NO: 1594 - RNA, 19 nt, Artificial Sequence
  Description of Artificial Sequence: Synthetic oligonucleotide
auucuauccaagauugggc

SEQ ID NO: 1595 - RNA, 19 nt, Artificial Sequence
  Description of Artificial Sequence: Synthetic oligonucleotide
cuaaacguaugaaagcauu

SEQ ID NO: 1596 - RNA, 19 nt, Artificial Sequence
  Description of Artificial Sequence: Synthetic oligonucleotide
ugguagagcaaggguucac

SEQ ID NO: 1597 - RNA, 19 nt, Artificial Sequence
  Description of Artificial Sequence: Synthetic oligonucleotide
cuguuccugaaaucaagac

SEQ ID NO: 1598 - RNA, 19 nt, Artificial Sequence
  Description of Artificial Sequence: Synthetic oligonucleotide
ccauccuugggaccaugcc

SEQ ID NO: 1599 - RNA, 19 nt, Artificial Sequence
  Description of Artificial Sequence: Synthetic oligonucleotide
cugccuuugaagucagucu

SEQ ID NO: 1600 - RNA, 19 nt, Artificial Sequence
  Description of Artificial Sequence: Synthetic oligonucleotide
uucaggcucuucagaaagc

SEQ ID NO: 1601 - RNA, 19 nt, Artificial Sequence
  Description of Artificial Sequence: Synthetic oligonucleotide
cuaccuuccagacaccuga

SEQ ID NO: 1602 - RNA, 19 nt, Artificial Sequence
  Description of Artificial Sequence: Synthetic oligonucleotide
auuuuauagucccccuaac

SEQ ID NO: 1603 - RNA, 19 nt, Artificial Sequence
  Description of Artificial Sequence: Synthetic oligonucleotide
cagauuugaggauuccauc

SEQ ID NO: 1604 - RNA, 19 nt, Artificial Sequence
  Description of Artificial Sequence: Synthetic oligonucleotide
caguucagauaaacuucaa

SEQ ID NO: 1605 - RNA, 19 nt, Artificial Sequence
  Description of Artificial Sequence: Synthetic oligonucleotide
aagacuuaaaaaauauaaa

SEQ ID NO: 1606 - RNA, 19 nt, Artificial Sequence
  Description of Artificial Sequence: Synthetic oligonucleotide
aaaucccauccagguuuuc

SEQ ID NO: 1607 - RNA, 19 nt, Artificial Sequence
  Description of Artificial Sequence: Synthetic oligonucleotide
ccacaccagaauuuaccau

SEQ ID NO: 1608 - RNA, 19 nt, Artificial Sequence
  Description of Artificial Sequence: Synthetic oligonucleotide
uccuuaacaccuuccacau

SEQ ID NO: 1609 - RNA, 19 nt, Artificial Sequence
  Description of Artificial Sequence: Synthetic oligonucleotide
uuccuuccuuuacaauuga

SEQ ID NO: 1610 - RNA, 19 nt, Artificial Sequence
  Description of Artificial Sequence: Synthetic oligonucleotide
acuuuguagaaaugaaagu

SEQ ID NO: 1611 - RNA, 19 nt, Artificial Sequence
  Description of Artificial Sequence: Synthetic oligonucleotide
uaaagaucaucagaaccau

SEQ ID NO: 1612 - RNA, 19 nt, Artificial Sequence
  Description of Artificial Sequence: Synthetic oligonucleotide
uugaccagaugcugaacag

SEQ ID NO: 1613 - RNA, 19 nt, Artificial Sequence
  Description of Artificial Sequence: Synthetic oligonucleotide
gugagcugcaguggcccgu

SEQ ID NO: 1614 - RNA, 19 nt, Artificial Sequence
  Description of Artificial Sequence: Synthetic oligonucleotide
uuccagauauauaucucag

SEQ ID NO: 1615 - RNA, 19 nt, Artificial Sequence
  Description of Artificial Sequence: Synthetic oligonucleotide
gggaucugaagguggagga

SEQ ID NO: 1616 - RNA, 19 nt, Artificial Sequence
  Description of Artificial Sequence: Synthetic oligonucleotide
acauuccucuagcgagaau

SEQ ID NO: 1617 - RNA, 19 nt, Artificial Sequence
  Description of Artificial Sequence: Synthetic oligonucleotide
ucacccugccagacuuccg

SEQ ID NO: 1618 - RNA, 19 nt, Artificial Sequence
  Description of Artificial Sequence: Synthetic oligonucleotide
guuuaccagaaaucgcaau

SEQ ID NO: 1619 - RNA, 19 nt, Artificial Sequence
  Description of Artificial Sequence: Synthetic oligonucleotide
uuccagaauucauaauccc

SEQ ID NO: 1620 - RNA, 19 nt, Artificial Sequence
  Description of Artificial Sequence: Synthetic oligonucleotide
caacucucaaccuuaauga

SEQ ID NO: 1621 - RNA, 19 nt, Artificial Sequence
  Description of Artificial Sequence: Synthetic oligonucleotide
auuuucaaguuccugaccu

SEQ ID NO: 1622 - RNA, 19 nt, Artificial Sequence
  Description of Artificial Sequence: Synthetic oligonucleotide
uucacauaccagaauucca

SEQ ID NO: 1623 - RNA, 19 nt, Artificial Sequence
  Description of Artificial Sequence: Synthetic oligonucleotide
agcuuccccacaucucaca

SEQ ID NO: 1624 - RNA, 19 nt, Artificial Sequence
  Description of Artificial Sequence: Synthetic oligonucleotide
acacaauugaaguaccuac

SEQ ID NO: 1625 - RNA, 19 nt, Artificial Sequence
  Description of Artificial Sequence: Synthetic oligonucleotide
cuuuuggcaagcuauacag

SEQ ID NO: 1626 - RNA, 19 nt, Artificial Sequence
  Description of Artificial Sequence: Synthetic oligonucleotide
guauucugaaaauccaauc

SEQ ID NO: 1627 - RNA, 19 nt, Artificial Sequence
  Description of Artificial Sequence: Synthetic oligonucleotide
cuccucuuuucacauuaga

SEQ ID NO: 1628 - RNA, 19 nt, Artificial Sequence
  Description of Artificial Sequence: Synthetic oligonucleotide
augcaaaugcugacauagg

SEQ ID NO: 1629 - RNA, 19 nt, Artificial Sequence
  Description of Artificial Sequence: Synthetic oligonucleotide
ggaauggaaccaccucagc

SEQ ID NO: 1630 - RNA, 19 nt, Artificial Sequence
  Description of Artificial Sequence: Synthetic oligonucleotide
caaacgaagcagguaucgc

SEQ ID NO: 1631 - RNA, 19 nt, Artificial Sequence
  Description of Artificial Sequence: Synthetic oligonucleotide
cagcuuccaucacugccaa

SEQ ID NO: 1632 - RNA, 19 nt, Artificial Sequence
  Description of Artificial Sequence: Synthetic oligonucleotide
aaggagaguccaaauuaga

SEQ ID NO: 1633 - RNA, 19 nt, Artificial Sequence
  Description of Artificial Sequence: Synthetic oligonucleotide
aaguucucaauuuugauuu

SEQ ID NO: 1634 - RNA, 19 nt, Artificial Sequence
  Description of Artificial Sequence: Synthetic oligonucleotide
uucaagcaaaugcacaacu

SEQ ID NO: 1635 - RNA, 19 nt, Artificial Sequence
  Description of Artificial Sequence: Synthetic oligonucleotide
ucucaaacccuaagauuaa

SEQ ID NO: 1636 - RNA, 19 nt, Artificial Sequence
  Description of Artificial Sequence: Synthetic oligonucleotide
auccgcuggcucugaagga

SEQ ID NO: 1637 - RNA, 19 nt, Artificial Sequence
  Description of Artificial Sequence: Synthetic oligonucleotide
agucagugaaguucuccag

SEQ ID NO: 1638 - RNA, 19 nt, Artificial Sequence
  Description of Artificial Sequence: Synthetic oligonucleotide
gcaaguaccugagaacgga

SEQ ID NO: 1639 - RNA, 19 nt, Artificial Sequence
  Description of Artificial Sequence: Synthetic oligonucleotide
agcaugggagugaaaugcu

SEQ ID NO: 1640 - RNA, 19 nt, Artificial Sequence
  Description of Artificial Sequence: Synthetic oligonucleotide
uguuuuuuggaaaugcuau

SEQ ID NO: 1641 - RNA, 19 nt, Artificial Sequence
  Description of Artificial Sequence: Synthetic oligonucleotide
uugagggaaaaucaaacac

SEQ ID NO: 1642 - RNA, 19 nt, Artificial Sequence
  Description of Artificial Sequence: Synthetic oligonucleotide
caguggcaaguuuacacac

SEQ ID NO: 1643 - RNA, 19 nt, Artificial Sequence
  Description of Artificial Sequence: Synthetic oligonucleotide
cagaaaaaaauacacugga

SEQ ID NO: 1644 - RNA, 19 nt, Artificial Sequence
  Description of Artificial Sequence: Synthetic oligonucleotide
agcuuaguaauggagugau

SEQ ID NO: 1645 - RNA, 19 nt, Artificial Sequence
  Description of Artificial Sequence: Synthetic oligonucleotide
uugucaagauaaacaauca

SEQ ID NO: 1646 - RNA, 19 nt, Artificial Sequence
  Description of Artificial Sequence: Synthetic oligonucleotide
agcuuacccuggauagcaa

SEQ ID NO: 1647 - RNA, 19 nt, Artificial Sequence
  Description of Artificial Sequence: Synthetic oligonucleotide
acacuaaauacuuccacaa

SEQ ID NO: 1648 - RNA, 19 nt, Artificial Sequence
  Description of Artificial Sequence: Synthetic oligonucleotide
aauugaacauccccaaacu

SEQ ID NO: 1649 - RNA, 19 nt, Artificial Sequence
  Description of Artificial Sequence: Synthetic oligonucleotide
uggacuucucuagucaggc

SEQ ID NO: 1650 - RNA, 19 nt, Artificial Sequence
  Description of Artificial Sequence: Synthetic oligonucleotide
cugaccugcgcaacgagau

SEQ ID NO: 1651 - RNA, 19 nt, Artificial Sequence
  Description of Artificial Sequence: Synthetic oligonucleotide
ucaagacacuguugaaagc

SEQ ID NO: 1652 - RNA, 19 nt, Artificial Sequence
  Description of Artificial Sequence: Synthetic oligonucleotide
cuggccacauagcauggac

SEQ ID NO: 1653 - RNA, 19 nt, Artificial Sequence
  Description of Artificial Sequence: Synthetic oligonucleotide
cuucuucuggaaaaggguc

SEQ ID NO: 1654 - RNA, 19 nt, Artificial Sequence
  Description of Artificial Sequence: Synthetic oligonucleotide
cauggaaaugggccugccc

SEQ ID NO: 1655 - RNA, 19 nt, Artificial Sequence
  Description of Artificial Sequence: Synthetic oligonucleotide
ccagauucucagaugaggg

SEQ ID NO: 1656 - RNA, 19 nt, Artificial Sequence
  Description of Artificial Sequence: Synthetic oligonucleotide
gaacacaugaaucacaaau

SEQ ID NO: 1657 - RNA, 19 nt, Artificial Sequence
  Description of Artificial Sequence: Synthetic oligonucleotide
uuaguuucaccauagaagg

SEQ ID NO: 1658 - RNA, 19 nt, Artificial Sequence
  Description of Artificial Sequence: Synthetic oligonucleotide
gaccccucacuuccuuugg

SEQ ID NO: 1659 - RNA, 19 nt, Artificial Sequence
  Description of Artificial Sequence: Synthetic oligonucleotide
gacuguccaauaagaucaa

SEQ ID NO: 1660 - RNA, 19 nt, Artificial Sequence
  Description of Artificial Sequence: Synthetic oligonucleotide
auagcaaacaccuaagagu

SEQ ID NO: 1661 - RNA, 19 nt, Artificial Sequence
  Description of Artificial Sequence: Synthetic oligonucleotide
uaaaccaaaacuugguuua

SEQ ID NO: 1662 - RNA, 19 nt, Artificial Sequence
  Description of Artificial Sequence: Synthetic oligonucleotide
augaaucuggcucccucaa

SEQ ID NO: 1663 - RNA, 19 nt, Artificial Sequence
  Description of Artificial Sequence: Synthetic oligonucleotide
acuuuucuaaacuugaaau

SEQ ID NO: 1664 - RNA, 19 nt, Artificial Sequence
  Description of Artificial Sequence: Synthetic oligonucleotide
uucaaucacaagucgauuc

SEQ ID NO: 1665 - RNA, 19 nt, Artificial Sequence
  Description of Artificial Sequence: Synthetic oligonucleotide
cccagcaugugggccacag

SEQ ID NO: 1666 - RNA, 19 nt, Artificial Sequence
  Description of Artificial Sequence: Synthetic oligonucleotide
guguucuaacugcuaaagg

SEQ ID NO: 1667 - RNA, 19 nt, Artificial Sequence
  Description of Artificial Sequence: Synthetic oligonucleotide
gcauggcacuguuuggaga

SEQ ID NO: 1668 - RNA, 19 nt, Artificial Sequence
  Description of Artificial Sequence: Synthetic oligonucleotide
aagggaaggcagaguuuac

SEQ ID NO: 1669 - RNA, 19 nt, Artificial Sequence
  Description of Artificial Sequence: Synthetic oligonucleotide
cugggaggcaugaugcuca

SEQ ID NO: 1670 - RNA, 19 nt, Artificial Sequence
  Description of Artificial Sequence: Synthetic oligonucleotide
auuuaaauggaaagguuau

SEQ ID NO: 1671 - RNA, 19 nt, Artificial Sequence
  Description of Artificial Sequence: Synthetic oligonucleotide
uuggaacuuugaaaaauuc

SEQ ID NO: 1672 - RNA, 19 nt, Artificial Sequence
  Description of Artificial Sequence: Synthetic oligonucleotide
cucuuuucuuuucagccca

SEQ ID NO: 1673 - RNA, 19 nt, Artificial Sequence
  Description of Artificial Sequence: Synthetic oligonucleotide
agccauuugagaucacggc

SEQ ID NO: 1674 - RNA, 19 nt, Artificial Sequence
  Description of Artificial Sequence: Synthetic oligonucleotide
cauccacaaacaaugaagg

SEQ ID NO: 1675 - RNA, 19 nt, Artificial Sequence
  Description of Artificial Sequence: Synthetic oligonucleotide
ggaauuugaaaguucguuu

SEQ ID NO: 1676 - RNA, 19 nt, Artificial Sequence
  Description of Artificial Sequence: Synthetic oligonucleotide
uuccauuaagguuaacagg

SEQ ID NO: 1677 - RNA, 19 nt, Artificial Sequence
  Description of Artificial Sequence: Synthetic oligonucleotide
ggaagauagacuuccugaa

SEQ ID NO: 1678 - RNA, 19 nt, Artificial Sequence
  Description of Artificial Sequence: Synthetic oligonucleotide
auaacuaugcacuguuucu

SEQ ID NO: 1679 - RNA, 19 nt, Artificial Sequence
  Description of Artificial Sequence: Synthetic oligonucleotide
ugagucccagugcccagca

SEQ ID NO: 1680 - RNA, 19 nt, Artificial Sequence
  Description of Artificial Sequence: Synthetic oligonucleotide
aagcaaguuggcaaguaag

SEQ ID NO: 1681 - RNA, 19 nt, Artificial Sequence
  Description of Artificial Sequence: Synthetic oligonucleotide
gugcuagguucaaucagua

SEQ ID NO: 1682 - RNA, 19 nt, Artificial Sequence
  Description of Artificial Sequence: Synthetic oligonucleotide
auaaguacaaccaaaauuu

SEQ ID NO: 1683 - RNA, 19 nt, Artificial Sequence
  Description of Artificial Sequence: Synthetic oligonucleotide
ucucugcuggaaacaacga

SEQ ID NO: 1684 - RNA, 19 nt, Artificial Sequence
  Description of Artificial Sequence: Synthetic oligonucleotide
agaacauuauggaggccca

SEQ ID NO: 1685 - RNA, 19 nt, Artificial Sequence
  Description of Artificial Sequence: Synthetic oligonucleotide
auguaggaauaaauggaga

SEQ ID NO: 1686 - RNA, 19 nt, Artificial Sequence
  Description of Artificial Sequence: Synthetic oligonucleotide
aagcaaaucuggauuucuu

SEQ ID NO: 1687 - RNA, 19 nt, Artificial Sequence
  Description of Artificial Sequence: Synthetic oligonucleotide
uaaacauuccuuuaacaau

SEQ ID NO: 1688 - RNA, 19 nt, Artificial Sequence
  Description of Artificial Sequence: Synthetic oligonucleotide
uuccugaaaugcgucuacc

SEQ ID NO: 1689 - RNA, 19 nt, Artificial Sequence
  Description of Artificial Sequence: Synthetic oligonucleotide
cuuacacaauaaucacaac

SEQ ID NO: 1690 - RNA, 19 nt, Artificial Sequence
  Description of Artificial Sequence: Synthetic oligonucleotide
cuccuccacugaaagauuu

SEQ ID NO: 1691 - RNA, 19 nt, Artificial Sequence
  Description of Artificial Sequence: Synthetic oligonucleotide
ucucucuaugggaaaaaac

SEQ ID NO: 1692 - RNA, 19 nt, Artificial Sequence
  Description of Artificial Sequence: Synthetic oligonucleotide
caggcuugaaggaauucuu

SEQ ID NO: 1693 - RNA, 19 nt, Artificial Sequence
  Description of Artificial Sequence: Synthetic oligonucleotide
ugaaaacgacaaagcaauc

SEQ ID NO: 1694 - RNA, 19 nt, Artificial Sequence
  Description of Artificial Sequence: Synthetic oligonucleotide
cauuugauuuaaguguaaa

SEQ ID NO: 1695 - RNA, 19 nt, Artificial Sequence
  Description of Artificial Sequence: Synthetic oligonucleotide
aagcucaguauaagaaaaa

SEQ ID NO: 1696 - RNA, 19 nt, Artificial Sequence
  Description of Artificial Sequence: Synthetic oligonucleotide
acaaacacaggcauuccau

SEQ ID NO: 1697 - RNA, 19 nt, Artificial Sequence
  Description of Artificial Sequence: Synthetic oligonucleotide
ucacaaauccuuuggcugu

SEQ ID NO: 1698 - RNA, 19 nt, Artificial Sequence
  Description of Artificial Sequence: Synthetic oligonucleotide
ugcuuugugaguuuaucag

SEQ ID NO: 1699 - RNA, 19 nt, Artificial Sequence
  Description of Artificial Sequence: Synthetic oligonucleotide
gucagagcaucaaauccuu

SEQ ID NO: 1700 - RNA, 19 nt, Artificial Sequence
  Description of Artificial Sequence: Synthetic oligonucleotide
uugacaggcauuuugaaaa

SEQ ID NO: 1701 - RNA, 19 nt, Artificial Sequence
  Description of Artificial Sequence: Synthetic oligonucleotide
aaaacagaaacaaugcauu

SEQ ID NO: 1702 - RNA, 19 nt, Artificial Sequence
  Description of Artificial Sequence: Synthetic oligonucleotide
uagauuuugucaccaaauc

SEQ ID NO: 1703 - RNA, 19 nt, Artificial Sequence
  Description of Artificial Sequence: Synthetic oligonucleotide
ccuauaaugaaacaaaaau

SEQ ID NO: 1704 - RNA, 19 nt, Artificial Sequence
  Description of Artificial Sequence: Synthetic oligonucleotide
uuaaguuugauaaguacaa

SEQ ID NO: 1705 - RNA, 19 nt, Artificial Sequence
  Description of Artificial Sequence: Synthetic oligonucleotide
aagcugaaaaaucucacga

SEQ ID NO: 1706 - RNA, 19 nt, Artificial Sequence
  Description of Artificial Sequence: Synthetic oligonucleotide
acgagcuccccaggaccuu

SEQ ID NO: 1707 - RNA, 19 nt, Artificial Sequence
  Description of Artificial Sequence: Synthetic oligonucleotide
uucaaauuccuggauacac

SEQ ID NO: 1708 - RNA, 19 nt, Artificial Sequence
  Description of Artificial Sequence: Synthetic oligonucleotide
cuguuccaguugucaaugu

SEQ ID NO: 1709 - RNA, 19 nt, Artificial Sequence
  Description of Artificial Sequence: Synthetic oligonucleotide
uugaagugucuccauucac

SEQ ID NO: 1710 - RNA, 19 nt, Artificial Sequence
  Description of Artificial Sequence: Synthetic oligonucleotide
ccauagagaugucggcauu

SEQ ID NO: 1711 - RNA, 19 nt, Artificial Sequence
  Description of Artificial Sequence: Synthetic oligonucleotide
ucggcuauguguucccaaa

SEQ ID NO: 1712 - RNA, 19 nt, Artificial Sequence
  Description of Artificial Sequence: Synthetic oligonucleotide
aagcagucagcaugccuag

SEQ ID NO: 1713 - RNA, 19 nt, Artificial Sequence
  Description of Artificial Sequence: Synthetic oligonucleotide
guuucuccauccuagguuc

SEQ ID NO: 1714 - RNA, 19 nt, Artificial Sequence
  Description of Artificial Sequence: Synthetic oligonucleotide
cugacguccgugugccuuc

SEQ ID NO: 1715 - RNA, 19 nt, Artificial Sequence
  Description of Artificial Sequence: Synthetic oligonucleotide
cauacacauuaauccugcc

SEQ ID NO: 1716 - RNA, 19 nt, Artificial Sequence
  Description of Artificial Sequence: Synthetic oligonucleotide
caucauuagagcugccagu

SEQ ID NO: 1717 - RNA, 19 nt, Artificial Sequence
  Description of Artificial Sequence: Synthetic oligonucleotide
uccuucaugucccuagaaa

SEQ ID NO: 1718 - RNA, 19 nt, Artificial Sequence
  Description of Artificial Sequence: Synthetic oligonucleotide
aucucaagcuuucucuucc

SEQ ID NO: 1719 - RNA, 19 nt, Artificial Sequence
  Description of Artificial Sequence: Synthetic oligonucleotide
cagauuucaaggaauugug

SEQ ID NO: 1720 - RNA, 19 nt, Artificial Sequence
  Description of Artificial Sequence: Synthetic oligonucleotide
guaccauaagccauauuuu

SEQ ID NO: 1721 - RNA, 19 nt, Artificial Sequence
  Description of Artificial Sequence: Synthetic oligonucleotide
uuauuccugccaugggcaa

SEQ ID NO: 1722 - RNA, 19 nt, Artificial Sequence
  Description of Artificial Sequence: Synthetic oligonucleotide
auauuaccuaugauuucuc

SEQ ID NO: 1723 - RNA, 19 nt, Artificial Sequence
  Description of Artificial Sequence: Synthetic oligonucleotide
ccuuuaaaucaagugucau

SEQ ID NO: 1724 - RNA, 19 nt, Artificial Sequence
  Description of Artificial Sequence: Synthetic oligonucleotide
ucacacugaauaccaaugc

SEQ ID NO: 1725 - RNA, 19 nt, Artificial Sequence
  Description of Artificial Sequence: Synthetic oligonucleotide
cugaacuuuuuaaccaguc

SEQ ID NO: 1726 - RNA, 19 nt, Artificial Sequence
  Description of Artificial Sequence: Synthetic oligonucleotide
cagauauuguugcucaucu

SEQ ID NO: 1727 - RNA, 19 nt, Artificial Sequence
  Description of Artificial Sequence: Synthetic oligonucleotide
uccuuucuucaucuucauc

SEQ ID NO: 1728 - RNA, 19 nt, Artificial Sequence
  Description of Artificial Sequence: Synthetic oligonucleotide
cugucauugaugcacugca

SEQ ID NO: 1729 - RNA, 19 nt, Artificial Sequence
  Description of Artificial Sequence: Synthetic oligonucleotide
aguacaaauuagagggcac

SEQ ID NO: 1730 - RNA, 19 nt, Artificial Sequence
  Description of Artificial Sequence: Synthetic oligonucleotide
ccacaagauugacaagaaa

SEQ ID NO: 1731 - RNA, 19 nt, Artificial Sequence
  Description of Artificial Sequence: Synthetic oligonucleotide
aaaggggauugaaguuagc

SEQ ID NO: 1732 - RNA, 19 nt, Artificial Sequence
  Description of Artificial Sequence: Synthetic oligonucleotide
ccacagcucugucucugag

SEQ ID NO: 1733 - RNA, 19 nt, Artificial Sequence
  Description of Artificial Sequence: Synthetic oligonucleotide
gcaacaaauuuguggaggg

SEQ ID NO: 1734 - RNA, 19 nt, Artificial Sequence
  Description of Artificial Sequence: Synthetic oligonucleotide
guagucauaacaguacugu

SEQ ID NO: 1735 - RNA, 19 nt, Artificial Sequence
  Description of Artificial Sequence: Synthetic oligonucleotide
ugagcuuaaccacgaaaaa

SEQ ID NO: 1736 - RNA, 19 nt, Artificial Sequence
  Description of Artificial Sequence: Synthetic oligonucleotide
auauggaagugucaguggc

SEQ ID NO: 1737 - RNA, 19 nt, Artificial Sequence
  Description of Artificial Sequence: Synthetic oligonucleotide
caacaaccacaaaagccca

SEQ ID NO: 1738 - RNA, 19 nt, Artificial Sequence
  Description of Artificial Sequence: Synthetic oligonucleotide
aaauuccaauuuugagaau

SEQ ID NO: 1739 - RNA, 19 nt, Artificial Sequence
  Description of Artificial Sequence: Synthetic oligonucleotide
ugaauuucaagcaagaacu

SEQ ID NO: 1740 - RNA, 19 nt, Artificial Sequence
  Description of Artificial Sequence: Synthetic oligonucleotide
uuaauggaaauaccaaguc

SEQ ID NO: 1741 - RNA, 19 nt, Artificial Sequence
  Description of Artificial Sequence: Synthetic oligonucleotide
caaaaccuacugucucuuc

SEQ ID NO: 1742 - RNA, 19 nt, Artificial Sequence
  Description of Artificial Sequence: Synthetic oligonucleotide
ccuccauggaauuuaagua

SEQ ID NO: 1743 - RNA, 19 nt, Artificial Sequence
  Description of Artificial Sequence: Synthetic oligonucleotide
augauuucaauucuucaau

SEQ ID NO: 1744 - RNA, 19 nt, Artificial Sequence
  Description of Artificial Sequence: Synthetic oligonucleotide
ugcuguacucuaccgcuaa

SEQ ID NO: 1745 - RNA, 19 nt, Artificial Sequence
  Description of Artificial Sequence: Synthetic oligonucleotide
aaggagcaguugaccacaa

SEQ ID NO: 1746 - RNA, 19 nt, Artificial Sequence
  Description of Artificial Sequence: Synthetic oligonucleotide
agcuuagcuuggaaagccu

SEQ ID NO: 1747 - RNA, 19 nt, Artificial Sequence
  Description of Artificial Sequence: Synthetic oligonucleotide
ucaccucuuacuuuuccau

SEQ ID NO: 1748 - RNA, 19 nt, Artificial Sequence
  Description of Artificial Sequence: Synthetic oligonucleotide
uugagucaucuaccaaagg

SEQ ID NO: 1749 - RNA, 19 nt, Artificial Sequence
  Description of Artificial Sequence: Synthetic oligonucleotide
gagaugucaaggguucggu

SEQ ID NO: 1750 - RNA, 19 nt, Artificial Sequence
  Description of Artificial Sequence: Synthetic oligonucleotide
uucuuucucgggaauauuc

SEQ ID NO: 1751 - RNA, 19 nt, Artificial Sequence
  Description of Artificial Sequence: Synthetic oligonucleotide
caggaacuauugcuaguga

SEQ ID NO: 1752 - RNA, 19 nt, Artificial Sequence
  Description of Artificial Sequence: Synthetic oligonucleotide
aggccaacacuuacuugaa

SEQ ID NO: 1753 - RNA, 19 nt, Artificial Sequence
  Description of Artificial Sequence: Synthetic oligonucleotide
auuccaagagcacacgguc

SEQ ID NO: 1754 - RNA, 19 nt, Artificial Sequence
  Description of Artificial Sequence: Synthetic oligonucleotide
cuucagugaagcugcaggg

SEQ ID NO: 1755 - RNA, 19 nt, Artificial Sequence
  Description of Artificial Sequence: Synthetic oligonucleotide
gcacuuccaaaauugauga

SEQ ID NO: 1756 - RNA, 19 nt, Artificial Sequence
  Description of Artificial Sequence: Synthetic oligonucleotide
auaucuggaaccuugaagu

SEQ ID NO: 1757 - RNA, 19 nt, Artificial Sequence
  Description of Artificial Sequence: Synthetic oligonucleotide
uaaaagaaaauuuugcugg

SEQ ID NO: 1758 - RNA, 19 nt, Artificial Sequence
  Description of Artificial Sequence: Synthetic oligonucleotide
gagaagccacacuccaacg

SEQ ID NO: 1759 - RNA, 19 nt, Artificial Sequence
  Description of Artificial Sequence: Synthetic oligonucleotide
gcauauauucccucuggga

SEQ ID NO: 1760 - RNA, 19 nt, Artificial Sequence
  Description of Artificial Sequence: Synthetic oligonucleotide
agcacaguacgaaaaacca

SEQ ID NO: 1761 - RNA, 19 nt, Artificial Sequence
  Description of Artificial Sequence: Synthetic oligonucleotide
acuuacagcuagagggccu

SEQ ID NO: 1762 - RNA, 19 nt, Artificial Sequence
  Description of Artificial Sequence: Synthetic oligonucleotide
ucuuuuucaccaacggaga

SEQ ID NO: 1763 - RNA, 19 nt, Artificial Sequence
  Description of Artificial Sequence: Synthetic oligonucleotide
aacauacaagcaaagccac

SEQ ID NO: 1764 - RNA, 19 nt, Artificial Sequence
  Description of Artificial Sequence: Synthetic oligonucleotide
cccuggaacucucuccaug

SEQ ID NO: 1765 - RNA, 19 nt, Artificial Sequence
  Description of Artificial Sequence: Synthetic oligonucleotide
ggcaaaugucagcucuugu

SEQ ID NO: 1766 - RNA, 19 nt, Artificial Sequence
  Description of Artificial Sequence: Synthetic oligonucleotide
uucagguccaugcaaguca

SEQ ID NO: 1767 - RNA, 19 nt, Artificial Sequence
  Description of Artificial Sequence: Synthetic oligonucleotide
agcccaguuccuuccauga

SEQ ID NO: 1768 - RNA, 19 nt, Artificial Sequence
  Description of Artificial Sequence: Synthetic oligonucleotide
auuucccugaccuuggcca

SEQ ID NO: 1769 - RNA, 19 nt, Artificial Sequence
  Description of Artificial Sequence: Synthetic oligonucleotide
aggaaguggcccugaaugc

SEQ ID NO: 1770 - RNA, 19 nt, Artificial Sequence
  Description of Artificial Sequence: Synthetic oligonucleotide
cuaacacuaagaaccagaa

SEQ ID NO: 1771 - RNA, 19 nt, Artificial Sequence
  Description of Artificial Sequence: Synthetic oligonucleotide
agaucagauggaaaaauga

SEQ ID NO: 1772 - RNA, 19 nt, Artificial Sequence
  Description of Artificial Sequence: Synthetic oligonucleotide
aaguccggauucauucugg

SEQ ID NO: 1773 - RNA, 19 nt, Artificial Sequence
  Description of Artificial Sequence: Synthetic oligonucleotide
ggucuuuccagagccaggu

SEQ ID NO: 1774 - RNA, 19 nt, Artificial Sequence
  Description of Artificial Sequence: Synthetic oligonucleotide
ucgagcuuuccaaugacca

SEQ ID NO: 1775 - RNA, 19 nt, Artificial Sequence
  Description of Artificial Sequence: Synthetic oligonucleotide
aagaaaaggcacaccuuga

SEQ ID NO: 1776 - RNA, 19 nt, Artificial Sequence
  Description of Artificial Sequence: Synthetic oligonucleotide
acauugcaggauccuuaga

SEQ ID NO: 1777 - RNA, 19 nt, Artificial Sequence
  Description of Artificial Sequence: Synthetic oligonucleotide
aaggacaccuaagguuccu

SEQ ID NO: 1778 - RNA, 19 nt, Artificial Sequence
  Description of Artificial Sequence: Synthetic oligonucleotide
ucaaaaauaucauccuacc

SEQ ID NO: 1779 - RNA, 19 nt, Artificial Sequence
  Description of Artificial Sequence: Synthetic oligonucleotide
cagucuaugacaagagcuu

SEQ ID NO: 1780 - RNA, 19 nt, Artificial Sequence
  Description of Artificial Sequence: Synthetic oligonucleotide
uaugggauuuccuaaagcu

SEQ ID NO: 1781 - RNA, 19 nt, Artificial Sequence
  Description of Artificial Sequence: Synthetic oligonucleotide
uggauguaaccaccagcau

SEQ ID NO: 1782 - RNA, 19 nt, Artificial Sequence
  Description of Artificial Sequence: Synthetic oligonucleotide
uugguaggagacagcaucu

SEQ ID NO: 1783 - RNA, 19 nt, Artificial Sequence
  Description of Artificial Sequence: Synthetic oligonucleotide
uucguguuucaacugccuu

SEQ ID NO: 1784 - RNA, 19 nt, Artificial Sequence
  Description of Artificial Sequence: Synthetic oligonucleotide
uuguguacaccaaaaaccc

SEQ ID NO: 1785 - RNA, 19 nt, Artificial Sequence
  Description of Artificial Sequence: Synthetic oligonucleotide
ccaauggcuauucauucuc

SEQ ID NO: 1786 - RNA, 19 nt, Artificial Sequence
  Description of Artificial Sequence: Synthetic oligonucleotide
ccaucccuguaaaaguuuu

SEQ ID NO: 1787 - RNA, 19 nt, Artificial Sequence
  Description of Artificial Sequence: Synthetic oligonucleotide
uggcugauaaauucauuau

SEQ ID NO: 1788 - RNA, 19 nt, Artificial Sequence
  Description of Artificial Sequence: Synthetic oligonucleotide
uuccugggcugaaacuaaa

SEQ ID NO: 1789 - RNA, 19 nt, Artificial Sequence
  Description of Artificial Sequence: Synthetic oligonucleotide
augaucuaaauucaguucu

SEQ ID NO: 1790 - RNA, 19 nt, Artificial Sequence
  Description of Artificial Sequence: Synthetic oligonucleotide
uugucaugccuacguucca

SEQ ID NO: 1791 - RNA, 19 nt, Artificial Sequence
  Description of Artificial Sequence: Synthetic oligonucleotide
augucccauuuacagaucu

SEQ ID NO: 1792 - RNA, 19 nt, Artificial Sequence
  Description of Artificial Sequence: Synthetic oligonucleotide
uucagguuccaucgugcaa

SEQ ID NO: 1793 - RNA, 19 nt, Artificial Sequence
  Description of Artificial Sequence: Synthetic oligonucleotide
aacuugacuucagagaaau

SEQ ID NO: 1794 - RNA, 19 nt, Artificial Sequence
  Description of Artificial Sequence: Synthetic oligonucleotide
uacaaaucuauaagaagcu

SEQ ID NO: 1795 - RNA, 19 nt, Artificial Sequence
  Description of Artificial Sequence: Synthetic oligonucleotide
ugagaacuucaucauuugc

SEQ ID NO: 1796 - RNA, 19 nt, Artificial Sequence
  Description of Artificial Sequence: Synthetic oligonucleotide
cccucaaccuaccaacacu

SEQ ID NO: 1797 - RNA, 19 nt, Artificial Sequence
  Description of Artificial Sequence: Synthetic oligonucleotide
uccccgagguaaaauuccc

SEQ ID NO: 1798 - RNA, 19 nt, Artificial Sequence
  Description of Artificial Sequence: Synthetic oligonucleotide
cugaaguugauguguuaac

SEQ ID NO: 1799 - RNA, 19 nt, Artificial Sequence
  Description of Artificial Sequence: Synthetic oligonucleotide
caaaauauucucaaccaga

SEQ ID NO: 1800 - RNA, 19 nt, Artificial Sequence
  Description of Artificial Sequence: Synthetic oligonucleotide
aagacuccuugauucccuu

SEQ ID NO: 1801 - RNA, 19 nt, Artificial Sequence
  Description of Artificial Sequence: Synthetic oligonucleotide
uuuuugagauaaccgugcc

SEQ ID NO: 1802 - RNA, 19 nt, Artificial Sequence
  Description of Artificial Sequence: Synthetic oligonucleotide
cugaaucucaguuaacugu

SEQ ID NO: 1803 - RNA, 19 nt, Artificial Sequence
  Description of Artificial Sequence: Synthetic oligonucleotide
ugucccaguucacgcuucc

SEQ ID NO: 1804 - RNA, 19 nt, Artificial Sequence
  Description of Artificial Sequence: Synthetic oligonucleotide
caaaaaguguuucagaugg

SEQ ID NO: 1805 - RNA, 19 nt, Artificial Sequence
  Description of Artificial Sequence: Synthetic oligonucleotide
gcauugcugcuuuggaucu

SEQ ID NO: 1806 - RNA, 19 nt, Artificial Sequence
  Description of Artificial Sequence: Synthetic oligonucleotide
uaaaugcaguagccaacaa

SEQ ID NO: 1807 - RNA, 19 nt, Artificial Sequence
  Description of Artificial Sequence: Synthetic oligonucleotide
agaucgcagacuuugaguu

SEQ ID NO: 1808 - RNA, 19 nt, Artificial Sequence
  Description of Artificial Sequence: Synthetic oligonucleotide
ugcccaccaucaucgugcc

SEQ ID NO: 1809 - RNA, 19 nt, Artificial Sequence
  Description of Artificial Sequence: Synthetic oligonucleotide
cugagcagaccauugagau

SEQ ID NO: 1810 - RNA, 19 nt, Artificial Sequence
  Description of Artificial Sequence: Synthetic oligonucleotide
uucccuccauuaaguucuc

SEQ ID NO: 1811 - RNA, 19 nt, Artificial Sequence
  Description of Artificial Sequence: Synthetic oligonucleotide
cuguaccugcuggaauugu

SEQ ID NO: 1812 - RNA, 19 nt, Artificial Sequence
  Description of Artificial Sequence: Synthetic oligonucleotide
ucauuccuuccuuucaagc

SEQ ID NO: 1813 - RNA, 19 nt, Artificial Sequence
  Description of Artificial Sequence: Synthetic oligonucleotide
cacugacugcacgcuuuga

SEQ ID NO: 1814 - RNA, 19 nt, Artificial Sequence
  Description of Artificial Sequence: Synthetic oligonucleotide
agguagacucucccgugua

SEQ ID NO: 1815 - RNA, 19 nt, Artificial Sequence
  Description of Artificial Sequence: Synthetic oligonucleotide
auaaugccacuuggagugc

SEQ ID NO: 1816 - RNA, 19 nt, Artificial Sequence
  Description of Artificial Sequence: Synthetic oligonucleotide
ccaguuugaaaaacaaagc

SEQ ID NO: 1817 - RNA, 19 nt, Artificial Sequence
  Description of Artificial Sequence: Synthetic oligonucleotide
cagauuauguugaaacagu

SEQ ID NO: 1818 - RNA, 19 nt, Artificial Sequence
  Description of Artificial Sequence: Synthetic oligonucleotide
uccuggauuccacaugcag

SEQ ID NO: 1819 - RNA, 19 nt, Artificial Sequence
  Description of Artificial Sequence: Synthetic oligonucleotide
gcucaaccguacaguuccu

SEQ ID NO: 1820 - RNA, 19 nt, Artificial Sequence
  Description of Artificial Sequence: Synthetic oligonucleotide
uagaauaugaacuaaaugu

SEQ ID NO: 1821 - RNA, 19 nt, Artificial Sequence
  Description of Artificial Sequence: Synthetic oligonucleotide
uuuugggaacacacaaaau

SEQ ID NO: 1822 - RNA, 19 nt, Artificial Sequence
  Description of Artificial Sequence: Synthetic oligonucleotide
ucgaagaugguacguuagc

SEQ ID NO: 1823 - RNA, 19 nt, Artificial Sequence
  Description of Artificial Sequence: Synthetic oligonucleotide
ccucuaagacuaaaggaac

SEQ ID NO: 1824 - RNA, 19 nt, Artificial Sequence
  Description of Artificial Sequence: Synthetic oligonucleotide
cauuugcacaccgugacuu

SEQ ID NO: 1825 - RNA, 19 nt, Artificial Sequence
  Description of Artificial Sequence: Synthetic oligonucleotide
ucagugcagaauaugaaga

SEQ ID NO: 1826 - RNA, 19 nt, Artificial Sequence
  Description of Artificial Sequence: Synthetic oligonucleotide
aagauggcaaauaugaagg

SEQ ID NO: 1827 - RNA, 19 nt, Artificial Sequence
  Description of Artificial Sequence: Synthetic oligonucleotide
gacuucaggaaugggaagg

SEQ ID NO: 1828 - RNA, 19 nt, Artificial Sequence
  Description of Artificial Sequence: Synthetic oligonucleotide
gaaaagcgcaccucaauau

SEQ ID NO: 1829 - RNA, 19 nt, Artificial Sequence
  Description of Artificial Sequence: Synthetic oligonucleotide
ucaaaagcccagcguucac

SEQ ID NO: 1830 - RNA, 19 nt, Artificial Sequence
  Description of Artificial Sequence: Synthetic oligonucleotide
ccgaucuccaucugcgcua

SEQ ID NO: 1831 - RNA, 19 nt, Artificial Sequence
  Description of Artificial Sequence: Synthetic oligonucleotide
accagaaagacaagaaagg

SEQ ID NO: 1832 - RNA, 19 nt, Artificial Sequence
  Description of Artificial Sequence: Synthetic oligonucleotide
gcaucuccaccucagcagc

SEQ ID NO: 1833 - RNA, 19 nt, Artificial Sequence
  Description of Artificial Sequence: Synthetic oligonucleotide
ccuccccagccguaggcac

SEQ ID NO: 1834 - RNA, 19 nt, Artificial Sequence
  Description of Artificial Sequence: Synthetic oligonucleotide
ccgugggcauggauaugga

SEQ ID NO: 1835 - RNA, 19 nt, Artificial Sequence
  Description of Artificial Sequence: Synthetic oligonucleotide
augaagaugacgacuuuuc

SEQ ID NO: 1836 - RNA, 19 nt, Artificial Sequence
  Description of Artificial Sequence: Synthetic oligonucleotide
cuaaauggaacuucuacua

SEQ ID NO: 1837 - RNA, 19 nt, Artificial Sequence
  Description of Artificial Sequence: Synthetic oligonucleotide
acagcccucaguccucucc

SEQ ID NO: 1838 - RNA, 19 nt, Artificial Sequence
  Description of Artificial Sequence: Synthetic oligonucleotide
cagauaaaaaacucaccau

SEQ ID NO: 1839 - RNA, 19 nt, Artificial Sequence
  Description of Artificial Sequence: Synthetic oligonucleotide
uauucaaaacugaguugag

SEQ ID NO: 1840 - RNA, 19 nt, Artificial Sequence
  Description of Artificial Sequence: Synthetic oligonucleotide
ggguccgggaaucugauga

SEQ ID NO: 1841 - RNA, 19 nt, Artificial Sequence
  Description of Artificial Sequence: Synthetic oligonucleotide
aggaaacucagaucaaagu

SEQ ID NO: 1842 - RNA, 19 nt, Artificial Sequence
  Description of Artificial Sequence: Synthetic oligonucleotide
uuaauugggaagaagaggc

SEQ ID NO: 1843 - RNA, 19 nt, Artificial Sequence
  Description of Artificial Sequence: Synthetic oligonucleotide
cagcuucuggcuugcuaac

SEQ ID NO: 1844 - RNA, 19 nt, Artificial Sequence
  Description of Artificial Sequence: Synthetic oligonucleotide
ccucucugaaagacaacgu

SEQ ID NO: 1845 - RNA, 19 nt, Artificial Sequence
  Description of Artificial Sequence: Synthetic oligonucleotide
ugcccaaggccacaggggu

SEQ ID NO: 1846 - RNA, 19 nt, Artificial Sequence
  Description of Artificial Sequence: Synthetic oligonucleotide
uccuuuaugauuaugucaa

SEQ ID NO: 1847 - RNA, 19 nt, Artificial Sequence
  Description of Artificial Sequence: Synthetic oligonucleotide
acaaguaccacugggaaca

SEQ ID NO: 1848 - RNA, 19 nt, Artificial Sequence
  Description of Artificial Sequence: Synthetic oligonucleotide
acacagggcucacccugag

SEQ ID NO: 1849 - RNA, 19 nt, Artificial Sequence
  Description of Artificial Sequence: Synthetic oligonucleotide
gagaagugucuucaaagcu

SEQ ID NO: 1850 - RNA, 19 nt, Artificial Sequence
  Description of Artificial Sequence: Synthetic oligonucleotide
ugagaagaaaucugcagaa

SEQ ID NO: 1851 - RNA, 19 nt, Artificial Sequence
  Description of Artificial Sequence: Synthetic oligonucleotide
acaaugcugaguggguuua

SEQ ID NO: 1852 - RNA, 19 nt, Artificial Sequence
  Description of Artificial Sequence: Synthetic oligonucleotide
aucaaggggccauuaggca

SEQ ID NO: 1853 - RNA, 19 nt, Artificial Sequence
  Description of Artificial Sequence: Synthetic oligonucleotide
aaauugaugauaucgacgu

SEQ ID NO: 1854 - RNA, 19 nt, Artificial Sequence
  Description of Artificial Sequence: Synthetic oligonucleotide
ugagguuccagaaagcagc

SEQ ID NO: 1855 - RNA, 19 nt, Artificial Sequence
  Description of Artificial Sequence: Synthetic oligonucleotide
ccaguggcaccacugggac

SEQ ID NO: 1856 - RNA, 19 nt, Artificial Sequence
  Description of Artificial Sequence: Synthetic oligonucleotide
ccuaccaagaguggaagga

SEQ ID NO: 1857 - RNA, 19 nt, Artificial Sequence
  Description of Artificial Sequence: Synthetic oligonucleotide
acaaggcccagaaucugua

SEQ ID NO: 1858 - RNA, 19 nt, Artificial Sequence
  Description of Artificial Sequence: Synthetic oligonucleotide
accaggaacuguugacuca

SEQ ID NO: 1859 - RNA, 19 nt, Artificial Sequence
  Description of Artificial Sequence: Synthetic oligonucleotide
aggaaggccaagccaguuu

SEQ ID NO: 1860 - RNA, 19 nt, Artificial Sequence
  Description of Artificial Sequence: Synthetic oligonucleotide
uccagggacucaaggauaa

SEQ ID NO: 1861 - RNA, 19 nt, Artificial Sequence
  Description of Artificial Sequence: Synthetic oligonucleotide
acguguuugauggcuuggu

SEQ ID NO: 1862 - RNA, 19 nt, Artificial Sequence
  Description of Artificial Sequence: Synthetic oligonucleotide
uacgaguuacucaagaauu

SEQ ID NO: 1863 - RNA, 19 nt, Artificial Sequence
  Description of Artificial Sequence: Synthetic oligonucleotide
uccauaugaaagucaagca

SEQ ID NO: 1864 - RNA, 19 nt, Artificial Sequence
  Description of Artificial Sequence: Synthetic oligonucleotide
aucugauugacucacucau

SEQ ID NO: 1865 - RNA, 19 nt, Artificial Sequence
  Description of Artificial Sequence: Synthetic oligonucleotide
uugauuuucugaacuuccc

SEQ ID NO: 1866 - RNA, 19 nt, Artificial Sequence
  Description of Artificial Sequence: Synthetic oligonucleotide
ccagauuccaguuuccggg

SEQ ID NO: 1867 - RNA, 19 nt, Artificial Sequence
  Description of Artificial Sequence: Synthetic oligonucleotide
ggaaaccugggauauacac

SEQ ID NO: 1868 - RNA, 19 nt, Artificial Sequence
  Description of Artificial Sequence: Synthetic oligonucleotide
cuagggaggaacuuugcac

SEQ ID NO: 1869 - RNA, 19 nt, Artificial Sequence
  Description of Artificial Sequence: Synthetic oligonucleotide
cuauguucauaagggaggu

SEQ ID NO: 1870 - RNA, 19 nt, Artificial Sequence
  Description of Artificial Sequence: Synthetic oligonucleotide
uagggacgguacuguccca

SEQ ID NO: 1871 - RNA, 19 nt, Artificial Sequence
  Description of Artificial Sequence: Synthetic oligonucleotide
agguauauucgaaagucca

SEQ ID NO: 1872 - RNA, 19 nt, Artificial Sequence
  Description of Artificial Sequence: Synthetic oligonucleotide
auaaugguucagaaauacu

SEQ ID NO: 1873 - RNA, 19 nt, Artificial Sequence
  Description of Artificial Sequence: Synthetic oligonucleotide
uguuuuccuauuuccaaga

SEQ ID NO: 1874 - RNA, 19 nt, Artificial Sequence
  Description of Artificial Sequence: Synthetic oligonucleotide
accuagugauuacacuucc

SEQ ID NO: 1875 - RNA, 19 nt, Artificial Sequence
  Description of Artificial Sequence: Synthetic oligonucleotide
cuuucgaguuaaggaaaca

SEQ ID NO: 1876 - RNA, 19 nt, Artificial Sequence
  Description of Artificial Sequence: Synthetic oligonucleotide
auaaacuaauagauguaau

SEQ ID NO: 1877 - RNA, 19 nt, Artificial Sequence
  Description of Artificial Sequence: Synthetic oligonucleotide
ucucgauguauagggaacu

SEQ ID NO: 1878 - RNA, 19 nt, Artificial Sequence
  Description of Artificial Sequence: Synthetic oligonucleotide
uguugaaagauuuaucaaa

SEQ ID NO: 1879 - RNA, 19 nt, Artificial Sequence
  Description of Artificial Sequence: Synthetic oligonucleotide
aagaagcccaagagguauu

SEQ ID NO: 1880 - RNA, 19 nt, Artificial Sequence
  Description of Artificial Sequence: Synthetic oligonucleotide
uuaaagccauucagucucu

SEQ ID NO: 1881 - RNA, 19 nt, Artificial Sequence
  Description of Artificial Sequence: Synthetic oligonucleotide
ucaagaccacagaggugcu

SEQ ID NO: 1882 - RNA, 19 nt, Artificial Sequence
  Description of Artificial Sequence: Synthetic oligonucleotide
uacguaaucuucaggaccu

SEQ ID NO: 1883 - RNA, 19 nt, Artificial Sequence
  Description of Artificial Sequence: Synthetic oligonucleotide
uuuuacaauucauuuucca

SEQ ID NO: 1884 - RNA, 19 nt, Artificial Sequence
  Description of Artificial Sequence: Synthetic oligonucleotide
aacuaauagaagauaacau

SEQ ID NO: 1885 - RNA, 19 nt, Artificial Sequence
  Description of Artificial Sequence: Synthetic oligonucleotide
uuaaacagcugaaagagau

SEQ ID NO: 1886 - RNA, 19 nt, Artificial Sequence
  Description of Artificial Sequence: Synthetic oligonucleotide
ugaaauuuacuuaucuuau

SEQ ID NO: 1887 - RNA, 19 nt, Artificial Sequence
  Description of Artificial Sequence: Synthetic oligonucleotide
uuaauuauauccaagauga

SEQ ID NO: 1888 - RNA, 19 nt, Artificial Sequence
  Description of Artificial Sequence: Synthetic oligonucleotide
agaucaacacaaucuucag

SEQ ID NO: 1889 - RNA, 19 nt, Artificial Sequence
  Description of Artificial Sequence: Synthetic oligonucleotide
gugauuauaucccauaugu

SEQ ID NO: 1890 - RNA, 19 nt, Artificial Sequence
  Description of Artificial Sequence: Synthetic oligonucleotide
uuuuuaaauuguugaaaga

SEQ ID NO: 1891 - RNA, 19 nt, Artificial Sequence
  Description of Artificial Sequence: Synthetic oligonucleotide
aaaaccuaugccuuaaucu

SEQ ID NO: 1892 - RNA, 19 nt, Artificial Sequence
  Description of Artificial Sequence: Synthetic oligonucleotide
uucauaaguucaaugaauu

SEQ ID NO: 1893 - RNA, 19 nt, Artificial Sequence
  Description of Artificial Sequence: Synthetic oligonucleotide
uuauucaaaacgagcuuca

SEQ ID NO: 1894 - RNA, 19 nt, Artificial Sequence
  Description of Artificial Sequence: Synthetic oligonucleotide
aggaagcuucucaagaguu

SEQ ID NO: 1895 - RNA, 19 nt, Artificial Sequence
  Description of Artificial Sequence: Synthetic oligonucleotide
uacagcagauccaucaaua

SEQ ID NO: 1896 - RNA, 19 nt, Artificial Sequence
  Description of Artificial Sequence: Synthetic oligonucleotide
acauuauggcccuucguga

SEQ ID NO: 1897 - RNA, 19 nt, Artificial Sequence
  Description of Artificial Sequence: Synthetic oligonucleotide
aagaauauuuugauccaag

SEQ ID NO: 1898 - RNA, 19 nt, Artificial Sequence
  Description of Artificial Sequence: Synthetic oligonucleotide
guauaguuggcuggacagu

SEQ ID NO: 1899 - RNA, 19 nt, Artificial Sequence
  Description of Artificial Sequence: Synthetic oligonucleotide
ugaaauauuaugaacuuga

SEQ ID NO: 1900 - RNA, 19 nt, Artificial Sequence
  Description of Artificial Sequence: Synthetic oligonucleotide
aagaaaagauagucagucu

SEQ ID NO: 1901 - RNA, 19 nt, Artificial Sequence
  Description of Artificial Sequence: Synthetic oligonucleotide
ugaucaagaaccuguuagu

SEQ ID NO: 1902 - RNA, 19 nt, Artificial Sequence
  Description of Artificial Sequence: Synthetic oligonucleotide
uugcucuuaaggacuucca

SEQ ID NO: 1903 - RNA, 19 nt, Artificial Sequence
  Description of Artificial Sequence: Synthetic oligonucleotide
auucugaauauauugucag

SEQ ID NO: 1904 - RNA, 19 nt, Artificial Sequence
  Description of Artificial Sequence: Synthetic oligonucleotide
gugccucuaacuuuacuuc

SEQ ID NO: 1905 - RNA, 19 nt, Artificial Sequence
  Description of Artificial Sequence: Synthetic oligonucleotide
cccaacucucaagucaagu

SEQ ID NO: 1906 - RNA, 19 nt, Artificial Sequence
  Description of Artificial Sequence: Synthetic oligonucleotide
uugagcaauuucugcacag

SEQ ID NO: 1907 - RNA, 19 nt, Artificial Sequence
  Description of Artificial Sequence: Synthetic oligonucleotide
gaaauauucaggaauaucu

SEQ ID NO: 1908 - RNA, 19 nt, Artificial Sequence
  Description of Artificial Sequence: Synthetic oligonucleotide
uuagcauccuuaccgaucc

SEQ ID NO: 1909 - RNA, 19 nt, Artificial Sequence
  Description of Artificial Sequence: Synthetic oligonucleotide
cagauggaaaagggaaaga

SEQ ID NO: 1910 - RNA, 19 nt, Artificial Sequence
  Description of Artificial Sequence: Synthetic oligonucleotide
agaagauugcagagcuuuc

SEQ ID NO: 1911 - RNA, 19 nt, Artificial Sequence
  Description of Artificial Sequence: Synthetic oligonucleotide
cugccacugcucaggaaau

SEQ ID NO: 1912 - RNA, 19 nt, Artificial Sequence
  Description of Artificial Sequence: Synthetic oligonucleotide
uaauuaaaagccaggccau

SEQ ID NO: 1913 - RNA, 19 nt, Artificial Sequence
  Description of Artificial Sequence: Synthetic oligonucleotide
uugcgacgaagaaaauaau

SEQ ID NO: 1914 - RNA, 19 nt, Artificial Sequence
  Description of Artificial Sequence: Synthetic oligonucleotide
uuucugauuaccaccagca

SEQ ID NO: 1915 - RNA, 19 nt, Artificial Sequence
  Description of Artificial Sequence: Synthetic oligonucleotide
aguuuagauauaaacugca

SEQ ID NO: 1916 - RNA, 19 nt, Artificial Sequence
  Description of Artificial Sequence: Synthetic oligonucleotide
aagauuuuucagaccaacu

SEQ ID NO: 1917 - RNA, 19 nt, Artificial Sequence
  Description of Artificial Sequence: Synthetic oligonucleotide
ucucugauuacuaugaaaa

SEQ ID NO: 1918 - RNA, 19 nt, Artificial Sequence
  Description of Artificial Sequence: Synthetic oligonucleotide
aauuuauugcugaauccaa

SEQ ID NO: 1919 - RNA, 19 nt, Artificial Sequence
  Description of Artificial Sequence: Synthetic oligonucleotide
aaagauugauugaccuguc

SEQ ID NO: 1920 - RNA, 19 nt, Artificial Sequence
  Description of Artificial Sequence: Synthetic oligonucleotide
ccauucaaaacuaccacac

SEQ ID NO: 1921 - RNA, 19 nt, Artificial Sequence
  Description of Artificial Sequence: Synthetic oligonucleotide
cauuucugauauacaucac

SEQ ID NO: 1922 - RNA, 19 nt, Artificial Sequence
  Description of Artificial Sequence: Synthetic oligonucleotide
cggaguuacugaaaaagcu

SEQ ID NO: 1923 - RNA, 19 nt, Artificial Sequence
  Description of Artificial Sequence: Synthetic oligonucleotide
ugcaaucaaccacagucau

SEQ ID NO: 1924 - RNA, 19 nt, Artificial Sequence
  Description of Artificial Sequence: Synthetic oligonucleotide
ugaaccccuacaugaagcu

SEQ ID NO: 1925 - RNA, 19 nt, Artificial Sequence
  Description of Artificial Sequence: Synthetic oligonucleotide
uugcuccaggagaacuuac

SEQ ID NO: 1926 - RNA, 19 nt, Artificial Sequence
  Description of Artificial Sequence: Synthetic oligonucleotide
cuaucauccucuaauuuuu

SEQ ID NO: 1927 - RNA, 19 nt, Artificial Sequence
  Description of Artificial Sequence: Synthetic oligonucleotide
uuaaaagaaaucuucauuu

SEQ ID NO: 1928 - RNA, 19 nt, Artificial Sequence
  Description of Artificial Sequence: Synthetic oligonucleotide
uauucuucuuuuccaauug

SEQ ID NO: 1929 - RNA, 19 nt, Artificial Sequence
  Description of Artificial Sequence: Synthetic oligonucleotide
gaacuuucacauagcacag

SEQ ID NO: 1930 - RNA, 19 nt, Artificial Sequence
  Description of Artificial Sequence: Synthetic oligonucleotide
gaaaaaauucaaacugccu

SEQ ID NO: 1931 - RNA, 19 nt, Artificial Sequence
  Description of Artificial Sequence: Synthetic oligonucleotide
uauauugauaaaaccauac

SEQ ID NO: 1932 - RNA, 19 nt, Artificial Sequence
  Description of Artificial Sequence: Synthetic oligonucleotide
cagugagccagccuugcag

SEQ ID NO: 1933 - RNA, 19 nt, Artificial Sequence
  Description of Artificial Sequence: Synthetic oligonucleotide
guaggcaguagacuauaag

SEQ ID NO: 1934 - RNA, 19 nt, Artificial Sequence
  Description of Artificial Sequence: Synthetic oligonucleotide
gcagaagcacauaugaacu

SEQ ID NO: 1935 - RNA, 19 nt, Artificial Sequence
  Description of Artificial Sequence: Synthetic oligonucleotide
uggaccugcaccaaagcug

SEQ ID NO: 1936 - RNA, 19 nt, Artificial Sequence
  Description of Artificial Sequence: Synthetic oligonucleotide
ggcaccagggcucggaagg

SEQ ID NO: 1937 - RNA, 19 nt, Artificial Sequence
  Description of Artificial Sequence: Synthetic oligonucleotide
gucucugaacucagaagga

SEQ ID NO: 1938 - RNA, 19 nt, Artificial Sequence
  Description of Artificial Sequence: Synthetic oligonucleotide
auggcauuuuuugcaaguu

SEQ ID NO: 1939 - RNA, 19 nt, Artificial Sequence
  Description of Artificial Sequence: Synthetic oligonucleotide
uaaagaaaaucaggaucug

SEQ ID NO: 1940 - RNA, 19 nt, Artificial Sequence
  Description of Artificial Sequence: Synthetic oligonucleotide
gaguuauuuugcuaaacuu

SEQ ID NO: 1941 - RNA, 19 nt, Artificial Sequence
  Description of Artificial Sequence: Synthetic oligonucleotide
ugggggaggaggaacaaau

SEQ ID NO: 1942 - RNA, 19 nt, Artificial Sequence
  Description of Artificial Sequence: Synthetic oligonucleotide
uaaauggagucuuuauugu

SEQ ID NO: 1943 - RNA, 19 nt, Artificial Sequence
  Description of Artificial Sequence: Synthetic oligonucleotide
gucuuuauuguguaucaua

SEQ ID NO: 1944 - RNA, 25 nt, Artificial Sequence
  Description of Artificial Sequence: Synthetic oligonucleotide
auucccaccgggaccugcggggcug

SEQ ID NO: 1945 - RNA, 25 nt, Artificial Sequence
  Description of Artificial Sequence: Synthetic oligonucleotide
gagugcccuucucgguugcugccgc

SEQ ID NO: 1946 - RNA, 25 nt, Artificial Sequence
  Description of Artificial Sequence: Synthetic oligonucleotide
cugaggagcccgcccagccagccag

SEQ ID NO: 1947 - RNA, 25 nt, Artificial Sequence
  Description of Artificial Sequence: Synthetic oligonucleotide
gggccgcgaggccgaggccaggccg

SEQ ID NO: 1948 - RNA, 25 nt, Artificial Sequence
  Description of Artificial Sequence: Synthetic oligonucleotide
gcagcccaggagccgccccaccgca

SEQ ID NO: 1949 - RNA, 25 nt, Artificial Sequence
  Description of Artificial Sequence: Synthetic oligonucleotide
agcuggcgauggacccgccgaggcc

SEQ ID NO: 1950 - RNA, 25 nt, Artificial Sequence
  Description of Artificial Sequence: Synthetic oligonucleotide
ccgcgcugcuggcgcugcuggcgcu

SEQ ID NO: 1951 - RNA, 25 nt, Artificial Sequence
  Description of Artificial Sequence: Synthetic oligonucleotide
ugccugcgcugcugcugcugcugcu

SEQ ID NO: 1952 - RNA, 25 nt, Artificial Sequence
  Description of Artificial Sequence: Synthetic oligonucleotide
uggcgggcgccagggccgaagagga

SEQ ID NO: 1953 - RNA, 25 nt, Artificial Sequence
  Description of Artificial Sequence: Synthetic oligonucleotide
aaaugcuggaaaaugucagccuggu

SEQ ID NO: 1954 - RNA, 25 nt, Artificial Sequence
  Description of Artificial Sequence: Synthetic oligonucleotide
ucuguccaaaagaugcgacccgauu

SEQ ID NO: 1955 - RNA, 25 nt, Artificial Sequence
  Description of Artificial Sequence: Synthetic oligonucleotide
ucaagcaccuccggaaguacacaua

SEQ ID NO: 1956 - RNA, 25 nt, Artificial Sequence
  Description of Artificial Sequence: Synthetic oligonucleotide
acaacuaugaggcugagaguuccag

SEQ ID NO: 1957 - RNA, 25 nt, Artificial Sequence
  Description of Artificial Sequence: Synthetic oligonucleotide
guggagucccugggacugcugauuc

SEQ ID NO: 1958 - RNA, 25 nt, Artificial Sequence
  Description of Artificial Sequence: Synthetic oligonucleotide
caagaagugccaccaggaucaacug

SEQ ID NO: 1959 - RNA, 25 nt, Artificial Sequence
  Description of Artificial Sequence: Synthetic oligonucleotide
gcaagguugagcuggagguucccca

SEQ ID NO: 1960 - RNA, 25 nt, Artificial Sequence
  Description of Artificial Sequence: Synthetic oligonucleotide
agcucugcagcuucauccugaagac

SEQ ID NO: 1961 - RNA, 25 nt, Artificial Sequence
  Description of Artificial Sequence: Synthetic oligonucleotide
ccagccagugcacccugaaagaggu

SEQ ID NO: 1962 - RNA, 25 nt, Artificial Sequence
  Description of Artificial Sequence: Synthetic oligonucleotide
uguauggcuucaacccugagggcaa

SEQ ID NO: 1963 - RNA, 25 nt, Artificial Sequence
  Description of Artificial Sequence: Synthetic oligonucleotide
aagccuugcugaagaaaaccaagaa

SEQ ID NO: 1964 - RNA, 25 nt, Artificial Sequence
  Description of Artificial Sequence: Synthetic oligonucleotide
acucugaggaguuugcugcagccau

SEQ ID NO: 1965 - RNA, 25 nt, Artificial Sequence
  Description of Artificial Sequence: Synthetic oligonucleotide
uguccagguaugagcucaagcuggc

SEQ ID NO: 1966 - RNA, 25 nt, Artificial Sequence
  Description of Artificial Sequence: Synthetic oligonucleotide
ccauuccagaagggaagcagguuuu

SEQ ID NO: 1967 - RNA, 25 nt, Artificial Sequence
  Description of Artificial Sequence: Synthetic oligonucleotide
uccuuuacccggagaaagaugaacc

SEQ ID NO: 1968 - RNA, 25 nt, Artificial Sequence
  Description of Artificial Sequence: Synthetic oligonucleotide
cuacuuacauccugaacaucaagag

SEQ ID NO: 1969 - RNA, 25 nt, Artificial Sequence
  Description of Artificial Sequence: Synthetic oligonucleotide
ggggcaucauuucugcccuccuggu

SEQ ID NO: 1970 - RNA, 25 nt, Artificial Sequence
  Description of Artificial Sequence: Synthetic oligonucleotide
uucccccagagacagaagaagccaa

SEQ ID NO: 1971 - RNA, 25 nt, Artificial Sequence
  Description of Artificial Sequence: Synthetic oligonucleotide
agcaaguguuguuucuggauaccgu

SEQ ID NO: 1972 - RNA, 25 nt, Artificial Sequence
  Description of Artificial Sequence: Synthetic oligonucleotide
uguauggaaacugcuccacucacuu

SEQ ID NO: 1973 - RNA, 25 nt, Artificial Sequence
  Description of Artificial Sequence: Synthetic oligonucleotide
uuaccgucaagacgaggaagggcaa

SEQ ID NO: 1974 - RNA, 25 nt, Artificial Sequence
  Description of Artificial Sequence: Synthetic oligonucleotide
auguggcaacagaaauauccacuga

SEQ ID NO: 1975 - RNA, 25 nt, Artificial Sequence
  Description of Artificial Sequence: Synthetic oligonucleotide
aaagagaccuggggcagugugaucg

SEQ ID NO: 1976 - RNA, 25 nt, Artificial Sequence
  Description of Artificial Sequence: Synthetic oligonucleotide
gcuucaagcccauccgcacaggcau

SEQ ID NO: 1977 - RNA, 25 nt, Artificial Sequence
  Description of Artificial Sequence: Synthetic oligonucleotide
ucagcccacuugcucucaucaaagg

SEQ ID NO: 1978 - RNA, 25 nt, Artificial Sequence
  Description of Artificial Sequence: Synthetic oligonucleotide
gcaugacccgccccuugucaacucu

SEQ ID NO: 1979 - RNA, 25 nt, Artificial Sequence
  Description of Artificial Sequence: Synthetic oligonucleotide
ugaucagcagcagccaguccuguca

SEQ ID NO: 1980 - RNA, 25 nt, Artificial Sequence
  Description of Artificial Sequence: Synthetic oligonucleotide
aguacacacuggacgcuaagaggaa

SEQ ID NO: 1981 - RNA, 25 nt, Artificial Sequence
  Description of Artificial Sequence: Synthetic oligonucleotide
agcauguggcagaagccaucugcaa

SEQ ID NO: 1982 - RNA, 25 nt, Artificial Sequence
  Description of Artificial Sequence: Synthetic oligonucleotide
aggagcaacaccucuuccugccuuu

SEQ ID NO: 1983 - RNA, 25 nt, Artificial Sequence
  Description of Artificial Sequence: Synthetic oligonucleotide
ucuccuacaagaauaaguaugggau

SEQ ID NO: 1984 - RNA, 25 nt, Artificial Sequence
  Description of Artificial Sequence: Synthetic oligonucleotide
ugguagcacaagugacacagacuuu

SEQ ID NO: 1985 - RNA, 25 nt, Artificial Sequence
  Description of Artificial Sequence: Synthetic oligonucleotide
ugaaacuugaagacacaccaaagau

SEQ ID NO: 1986 - RNA, 25 nt, Artificial Sequence
  Description of Artificial Sequence: Synthetic oligonucleotide
ucaacagccgcuucuuuggugaagg

SEQ ID NO: 1987 - RNA, 25 nt, Artificial Sequence
  Description of Artificial Sequence: Synthetic oligonucleotide
guacuaagaagaugggccucgcauu

SEQ ID NO: 1988 - RNA, 25 nt, Artificial Sequence
  Description of Artificial Sequence: Synthetic oligonucleotide
uugagagcaccaaauccacaucacc

SEQ ID NO: 1989 - RNA, 25 nt, Artificial Sequence
  Description of Artificial Sequence: Synthetic oligonucleotide
cuccaaagcaggccgaagcuguuuu

SEQ ID NO: 1990 - RNA, 25 nt, Artificial Sequence
  Description of Artificial Sequence: Synthetic oligonucleotide
ugaagacucuccaggaacugaaaaa

SEQ ID NO: 1991 - RNA, 25 nt, Artificial Sequence
  Description of Artificial Sequence: Synthetic oligonucleotide
aacuaaccaucucugagcaaaauau

SEQ ID NO: 1992 - RNA, 25 nt, Artificial Sequence
  Description of Artificial Sequence: Synthetic oligonucleotide
uccagagagcuaaucucuucaauaa

SEQ ID NO: 1993 - RNA, 25 nt, Artificial Sequence
  Description of Artificial Sequence: Synthetic oligonucleotide
agcugguuacugagcugagaggccu

SEQ ID NO: 1994 - RNA, 25 nt, Artificial Sequence
  Description of Artificial Sequence: Synthetic oligonucleotide
ucagugaugaagcagucacaucucu

SEQ ID NO: 1995 - RNA, 25 nt, Artificial Sequence
  Description of Artificial Sequence: Synthetic oligonucleotide
ucuugccacagcugauugagguguc

SEQ ID NO: 1996 - RNA, 25 nt, Artificial Sequence
  Description of Artificial Sequence: Synthetic oligonucleotide
ccagccccaucacuuuacaagccuu

SEQ ID NO: 1997 - RNA, 25 nt, Artificial Sequence
  Description of Artificial Sequence: Synthetic oligonucleotide
ugguucaguguggacagccucagug

SEQ ID NO: 1998 - RNA, 25 nt, Artificial Sequence
  Description of Artificial Sequence: Synthetic oligonucleotide
gcuccacucacauccuccaguggcu

SEQ ID NO: 1999 - RNA, 25 nt, Artificial Sequence
  Description of Artificial Sequence: Synthetic oligonucleotide
ugaaacgugugcaugccaacccccu

SEQ ID NO: 2000 - RNA, 25 nt, Artificial Sequence
  Description of Artificial Sequence: Synthetic oligonucleotide
uucugauagauguggucaccuaccu

SEQ ID NO: 2001 - RNA, 25 nt, Artificial Sequence
  Description of Artificial Sequence: Synthetic oligonucleotide
ugguggcccugauccccgagcccuc

SEQ ID NO: 2002 - RNA, 25 nt, Artificial Sequence
  Description of Artificial Sequence: Synthetic oligonucleotide
cagcacagcagcugcgagagaucuu

SEQ ID NO: 2003 - RNA, 25 nt, Artificial Sequence
  Description of Artificial Sequence: Synthetic oligonucleotide
ucaacauggcgagggaucagcgcag

SEQ ID NO: 2004 - RNA, 25 nt, Artificial Sequence
  Description of Artificial Sequence: Synthetic oligonucleotide
gccgagccaccuuguaugcgcugag

SEQ ID NO: 2005 - RNA, 25 nt, Artificial Sequence
  Description of Artificial Sequence: Synthetic oligonucleotide
gccacgcggucaacaacuaucauaa

SEQ ID NO: 2006 - RNA, 25 nt, Artificial Sequence
  Description of Artificial Sequence: Synthetic oligonucleotide
agacaaacccuacagggacccagga

SEQ ID NO: 2007 - RNA, 25 nt, Artificial Sequence
  Description of Artificial Sequence: Synthetic oligonucleotide
agcugcuggacauugcuaauuaccu

SEQ ID NO: 2008 - RNA, 25 nt, Artificial Sequence
  Description of Artificial Sequence: Synthetic oligonucleotide
ugauggaacagauucaagaugacug

SEQ ID NO: 2009 - RNA, 25 nt, Artificial Sequence
  Description of Artificial Sequence: Synthetic oligonucleotide
gcacuggggaugaagauuacaccua

SEQ ID NO: 2010 - RNA, 25 nt, Artificial Sequence
  Description of Artificial Sequence: Synthetic oligonucleotide
auuugauucugcgggucauuggaaa

SEQ ID NO: 2011 - RNA, 25 nt, Artificial Sequence
  Description of Artificial Sequence: Synthetic oligonucleotide
auaugggccaaaccauggagcaguu

SEQ ID NO: 2012 - RNA, 25 nt, Artificial Sequence
  Description of Artificial Sequence: Synthetic oligonucleotide
uaacuccagaacucaagucuucaau

SEQ ID NO: 2013 - RNA, 25 nt, Artificial Sequence
  Description of Artificial Sequence: Synthetic oligonucleotide
uccugaaauguguccaaaguacaaa

SEQ ID NO: 2014 - RNA, 25 nt, Artificial Sequence
  Description of Artificial Sequence: Synthetic oligonucleotide
agccaucacugaugauccagaaagc

SEQ ID NO: 2015 - RNA, 25 nt, Artificial Sequence
  Description of Artificial Sequence: Synthetic oligonucleotide
cugccauccaggcucugcggaaaau

SEQ ID NO: 2016 - RNA, 25 nt, Artificial Sequence
  Description of Artificial Sequence: Synthetic oligonucleotide
uggagccuaaagacaaggaccagga

SEQ ID NO: 2017 - RNA, 25 nt, Artificial Sequence
  Description of Artificial Sequence: Synthetic oligonucleotide
agguucuucuucagacuuuccuuga

SEQ ID NO: 2018 - RNA, 25 nt, Artificial Sequence
  Description of Artificial Sequence: Synthetic oligonucleotide
augaugcuucuccgggagauaagcg

SEQ ID NO: 2019 - RNA, 25 nt, Artificial Sequence
  Description of Artificial Sequence: Synthetic oligonucleotide
gacuggcugccuaucuuauguugau

SEQ ID NO: 2020 - RNA, 25 nt, Artificial Sequence
  Description of Artificial Sequence: Synthetic oligonucleotide
ugaggaguccuucacaggcagauau

SEQ ID NO: 2021 - RNA, 25 nt, Artificial Sequence
  Description of Artificial Sequence: Synthetic oligonucleotide
uuaacaaaauuguccaaauucuacc

SEQ ID NO: 2022 - RNA, 25 nt, Artificial Sequence
  Description of Artificial Sequence: Synthetic oligonucleotide
caugggaacagaaugagcaagugaa

SEQ ID NO: 2023 - RNA, 25 nt, Artificial Sequence
  Description of Artificial Sequence: Synthetic oligonucleotide
agaacuuuguggcuucccauauugc

SEQ ID NO: 2024 - RNA, 25 nt, Artificial Sequence
  Description of Artificial Sequence: Synthetic oligonucleotide
ccaauaucuugaacucagaagaauu

SEQ ID NO: 2025 - RNA, 25 nt, Artificial Sequence
  Description of Artificial Sequence: Synthetic oligonucleotide
uggauauccaagaucugaaaaaguu

SEQ ID NO: 2026 - RNA, 25 nt, Artificial Sequence
  Description of Artificial Sequence: Synthetic oligonucleotide
uagugaaagaagcucugaaagaauc

SEQ ID NO: 2027 - RNA, 25 nt, Artificial Sequence
  Description of Artificial Sequence: Synthetic oligonucleotide
cucaacuuccaacugucauggacuu

SEQ ID NO: 2028 - RNA, 25 nt, Artificial Sequence
  Description of Artificial Sequence: Synthetic oligonucleotide
ucagaaaauucucucggaacuauca

SEQ ID NO: 2029 - RNA, 25 nt, Artificial Sequence
  Description of Artificial Sequence: Synthetic oligonucleotide
aacucuacaaaucuguuucucuucc

SEQ ID NO: 2030 - RNA, 25 nt, Artificial Sequence
  Description of Artificial Sequence: Synthetic oligonucleotide
caucacuugacccagccucagccaa

SEQ ID NO: 2031 - RNA, 25 nt, Artificial Sequence
  Description of Artificial Sequence: Synthetic oligonucleotide
aaauagaagggaaucuuauauuuga

SEQ ID NO: 2032 - RNA, 25 nt, Artificial Sequence
  Description of Artificial Sequence: Synthetic oligonucleotide
auccaaauaacuaccuuccuaaaga

SEQ ID NO: 2033 - RNA, 25 nt, Artificial Sequence
  Description of Artificial Sequence: Synthetic oligonucleotide
aaagcaugcugaaaacuacccucac

SEQ ID NO: 2034 - RNA, 25 nt, Artificial Sequence
  Description of Artificial Sequence: Synthetic oligonucleotide
cugccuuuggauuugcuucagcuga

SEQ ID NO: 2035 - RNA, 25 nt, Artificial Sequence
  Description of Artificial Sequence: Synthetic oligonucleotide
accucaucgagauuggcuuggaagg

SEQ ID NO: 2036 - RNA, 25 nt, Artificial Sequence
  Description of Artificial Sequence: Synthetic oligonucleotide
gaaaaggcuuugagccaacauugga

SEQ ID NO: 2037 - RNA, 25 nt, Artificial Sequence
  Description of Artificial Sequence: Synthetic oligonucleotide
aagcucuuuuugggaagcaaggauu

SEQ ID NO: 2038 - RNA, 25 nt, Artificial Sequence
  Description of Artificial Sequence: Synthetic oligonucleotide
uuuucccagacagugucaacaaagc

SEQ ID NO: 2039 - RNA, 25 nt, Artificial Sequence
  Description of Artificial Sequence: Synthetic oligonucleotide
cuuuguacuggguuaauggucaagu

SEQ ID NO: 2040 - RNA, 25 nt, Artificial Sequence
  Description of Artificial Sequence: Synthetic oligonucleotide
uuccugauggugucucuaaggucuu

SEQ ID NO: 2041 - RNA, 25 nt, Artificial Sequence
  Description of Artificial Sequence: Synthetic oligonucleotide
uaguggaccacuuuggcuauaccaa

SEQ ID NO: 2042 - RNA, 25 nt, Artificial Sequence
  Description of Artificial Sequence: Synthetic oligonucleotide
aagaugauaaacaugagcaggauau

SEQ ID NO: 2043 - RNA, 25 nt, Artificial Sequence
  Description of Artificial Sequence: Synthetic oligonucleotide
ugguaaauggaauaaugcucagugu

SEQ ID NO: 2044 - RNA, 25 nt, Artificial Sequence
  Description of Artificial Sequence: Synthetic oligonucleotide
uugagaagcugauuaaagauuugaa

SEQ ID NO: 2045 - RNA, 25 nt, Artificial Sequence
  Description of Artificial Sequence: Synthetic oligonucleotide
aauccaaagaagucccggaagccag

SEQ ID NO: 2046 - RNA, 25 nt, Artificial Sequence
  Description of Artificial Sequence: Synthetic oligonucleotide
gagccuaccuccgcaucuugggaga

SEQ ID NO: 2047 - RNA, 25 nt, Artificial Sequence
  Description of Artificial Sequence: Synthetic oligonucleotide
aggagcuugguuuugccagucucca

SEQ ID NO: 2048 - RNA, 25 nt, Artificial Sequence
  Description of Artificial Sequence: Synthetic oligonucleotide
augaccuccagcuccugggaaagcu

SEQ ID NO: 2049 - RNA, 25 nt, Artificial Sequence
  Description of Artificial Sequence: Synthetic oligonucleotide
ugcuucugaugggugcccgcacucu

SEQ ID NO: 2050 - RNA, 25 nt, Artificial Sequence
  Description of Artificial Sequence: Synthetic oligonucleotide
ugcaggggaucccccagaugauugg

SEQ ID NO: 2051 - RNA, 25 nt, Artificial Sequence
  Description of Artificial Sequence: Synthetic oligonucleotide
gagaggucaucaggaagggcucaaa

SEQ ID NO: 2052 - RNA, 25 nt, Artificial Sequence
  Description of Artificial Sequence: Synthetic oligonucleotide
agaaugacuuuuuucuucacuacau

SEQ ID NO: 2053 - RNA, 25 nt, Artificial Sequence
  Description of Artificial Sequence: Synthetic oligonucleotide
ucuucauggagaaugccuuugaacu

SEQ ID NO: 2054 - RNA, 25 nt, Artificial Sequence
  Description of Artificial Sequence: Synthetic oligonucleotide
uccccacuggagcuggauuacaguu

SEQ ID NO: 2055 - RNA, 25 nt, Artificial Sequence
  Description of Artificial Sequence: Synthetic oligonucleotide
ugcaaauaucuucaucuggagucau

SEQ ID NO: 2056 - RNA, 25 nt, Artificial Sequence
  Description of Artificial Sequence: Synthetic oligonucleotide
uugcucccggagccaaggcuggagu

SEQ ID NO: 2057 - RNA, 25 nt, Artificial Sequence
  Description of Artificial Sequence: Synthetic oligonucleotide
uaaaacuggaaguagccaacaugca

SEQ ID NO: 2058 - RNA, 25 nt, Artificial Sequence
  Description of Artificial Sequence: Synthetic oligonucleotide
aggcugaacugguggcaaaacccuc

SEQ ID NO: 2059 - RNA, 25 nt, Artificial Sequence
  Description of Artificial Sequence: Synthetic oligonucleotide
ccgugucuguggaguuugugacaaa

SEQ ID NO: 2060 - RNA, 25 nt, Artificial Sequence
  Description of Artificial Sequence: Synthetic oligonucleotide
auaugggcaucaucauuccggacuu

SEQ ID NO: 2061 - RNA, 25 nt, Artificial Sequence
  Description of Artificial Sequence: Synthetic oligonucleotide
ucgcuaggagugggguccagaugaa

SEQ ID NO: 2062 - RNA, 25 nt, Artificial Sequence
  Description of Artificial Sequence: Synthetic oligonucleotide
acaccaacuucuuccacgagucggg

SEQ ID NO: 2063 - RNA, 25 nt, Artificial Sequence
  Description of Artificial Sequence: Synthetic oligonucleotide
gucuggaggcucauguugcccuaaa

SEQ ID NO: 2064 - RNA, 25 nt, Artificial Sequence
  Description of Artificial Sequence: Synthetic oligonucleotide
aagcugggaagcugaaguuuaucau

SEQ ID NO: 2065 - RNA, 25 nt, Artificial Sequence
  Description of Artificial Sequence: Synthetic oligonucleotide
uuccuuccccaaagagaccagucaa

SEQ ID NO: 2066 - RNA, 25 nt, Artificial Sequence
  Description of Artificial Sequence: Synthetic oligonucleotide
agcugcucaguggaggcaacacauu

SEQ ID NO: 2067 - RNA, 25 nt, Artificial Sequence
  Description of Artificial Sequence: Synthetic oligonucleotide
uacauuuggucucuaccaccaaaac

SEQ ID NO: 2068 - RNA, 25 nt, Artificial Sequence
  Description of Artificial Sequence: Synthetic oligonucleotide
cggaggugaucccaccucucauuga

SEQ ID NO: 2069 - RNA, 25 nt, Artificial Sequence
  Description of Artificial Sequence: Synthetic oligonucleotide
agaacaggcaguccuggucaguuug

SEQ ID NO: 2070 - RNA, 25 nt, Artificial Sequence
  Description of Artificial Sequence: Synthetic oligonucleotide
gcaagcaagucuuuccuggccugaa

SEQ ID NO: 2071 - RNA, 25 nt, Artificial Sequence
  Description of Artificial Sequence: Synthetic oligonucleotide
auuacugcaccucaggcgcuuacuc

SEQ ID NO: 2072 - RNA, 25 nt, Artificial Sequence
  Description of Artificial Sequence: Synthetic oligonucleotide
ccaacgccagcuccacagacuccgc

SEQ ID NO: 2073 - RNA, 25 nt, Artificial Sequence
  Description of Artificial Sequence: Synthetic oligonucleotide
ccuccuacuauccgcugaccgggga

SEQ ID NO: 2074 - RNA, 25 nt, Artificial Sequence
  Description of Artificial Sequence: Synthetic oligonucleotide
acaccagauuagagcuggaacugag

SEQ ID NO: 2075 - RNA, 25 nt, Artificial Sequence
  Description of Artificial Sequence: Synthetic oligonucleotide
ggccuacaggagagauugagcagua

SEQ ID NO: 2076 - RNA, 25 nt, Artificial Sequence
  Description of Artificial Sequence: Synthetic oligonucleotide
auucugucagcgcaaccuaugagcu

SEQ ID NO: 2077 - RNA, 25 nt, Artificial Sequence
  Description of Artificial Sequence: Synthetic oligonucleotide
uccagagagaggacagagccuuggu

SEQ ID NO: 2078 - RNA, 25 nt, Artificial Sequence
  Description of Artificial Sequence: Synthetic oligonucleotide
uggauacccugaaguuuguaacuca

SEQ ID NO: 2079 - RNA, 25 nt, Artificial Sequence
  Description of Artificial Sequence: Synthetic oligonucleotide
aagcagaaggugcgaagcagacuga

SEQ ID NO: 2080 - RNA, 25 nt, Artificial Sequence
  Description of Artificial Sequence: Synthetic oligonucleotide
aggcuaccaugacauucaaauauaa

SEQ ID NO: 2081 - RNA, 25 nt, Artificial Sequence
  Description of Artificial Sequence: Synthetic oligonucleotide
aucggcagaguaugaccuuguccag

SEQ ID NO: 2082 - RNA, 25 nt, Artificial Sequence
  Description of Artificial Sequence: Synthetic oligonucleotide
gugaaguccaaauuccggauuuuga

SEQ ID NO: 2083 - RNA, 25 nt, Artificial Sequence
  Description of Artificial Sequence: Synthetic oligonucleotide
auguugaccucggaacaauccucag

SEQ ID NO: 2084 - RNA, 25 nt, Artificial Sequence
  Description of Artificial Sequence: Synthetic oligonucleotide
gaguuaaugaugaaucuacugaggg

SEQ ID NO: 2085 - RNA, 25 nt, Artificial Sequence
  Description of Artificial Sequence: Synthetic oligonucleotide
gcaaaacgucuuacagacucacccu

SEQ ID NO: 2086 - RNA, 25 nt, Artificial Sequence
  Description of Artificial Sequence: Synthetic oligonucleotide
uggacauucagaacaagaaaauuac

SEQ ID NO: 2087 - RNA, 25 nt, Artificial Sequence
  Description of Artificial Sequence: Synthetic oligonucleotide
cugaggucgcccucaugggccaccu

SEQ ID NO: 2088 - RNA, 25 nt, Artificial Sequence
  Description of Artificial Sequence: Synthetic oligonucleotide
uaaguugugacacaaaggaagaaag

SEQ ID NO: 2089 - RNA, 25 nt, Artificial Sequence
  Description of Artificial Sequence: Synthetic oligonucleotide
gaaaaaucaaggguguuauuuccau

SEQ ID NO: 2090 - RNA, 25 nt, Artificial Sequence
  Description of Artificial Sequence: Synthetic oligonucleotide
uaccccguuugcaagcagaagccag

SEQ ID NO: 2091 - RNA, 25 nt, Artificial Sequence
  Description of Artificial Sequence: Synthetic oligonucleotide
gaagugagauccucgcccacugguc

SEQ ID NO: 2092 - RNA, 25 nt, Artificial Sequence
  Description of Artificial Sequence: Synthetic oligonucleotide
cgccugccaaacugcuucuccaaau

SEQ ID NO: 2093 - RNA, 25 nt, Artificial Sequence
  Description of Artificial Sequence: Synthetic oligonucleotide
uggacucaucugcuacagcuuaugg

SEQ ID NO: 2094 - RNA, 25 nt, Artificial Sequence
  Description of Artificial Sequence: Synthetic oligonucleotide
gcuccacaguuuccaagaggguggc

SEQ ID NO: 2095 - RNA, 25 nt, Artificial Sequence
  Description of Artificial Sequence: Synthetic oligonucleotide
cauggcauuaugaugaagagaagau

SEQ ID NO: 2096 - RNA, 25 nt, Artificial Sequence
  Description of Artificial Sequence: Synthetic oligonucleotide
uugaauuugaauggaacacaggcac

SEQ ID NO: 2097 - RNA, 25 nt, Artificial Sequence
  Description of Artificial Sequence: Synthetic oligonucleotide
ccaauguagauaccaaaaaaaugac

SEQ ID NO: 2098 - RNA, 25 nt, Artificial Sequence
  Description of Artificial Sequence: Synthetic oligonucleotide
cuuccaauuucccuguggaucucuc

SEQ ID NO: 2099 - RNA, 25 nt, Artificial Sequence
  Description of Artificial Sequence: Synthetic oligonucleotide
ccgauuauccuaagagcuugcauau

SEQ ID NO: 2100 - RNA, 25 nt, Artificial Sequence
  Description of Artificial Sequence: Synthetic oligonucleotide
uguaugcuaauagacuccuggauca

SEQ ID NO: 2101 - RNA, 25 nt, Artificial Sequence
  Description of Artificial Sequence: Synthetic oligonucleotide
acagagucccucaaacagacaugac

SEQ ID NO: 2102 - RNA, 25 nt, Artificial Sequence
  Description of Artificial Sequence: Synthetic oligonucleotide
cuuuccggcacguggguuccaaauu

SEQ ID NO: 2103 - RNA, 25 nt, Artificial Sequence
  Description of Artificial Sequence: Synthetic oligonucleotide
uaauaguugcaaugagcucauggcu

SEQ ID NO: 2104 - RNA, 25 nt, Artificial Sequence
  Description of Artificial Sequence: Synthetic oligonucleotide
uucagaaggcaucugggagucuucc

SEQ ID NO: 2105 - RNA, 25 nt, Artificial Sequence
  Description of Artificial Sequence: Synthetic oligonucleotide
cuuauacccagacuuugcaagacca

SEQ ID NO: 2106 - RNA, 25 nt, Artificial Sequence
  Description of Artificial Sequence: Synthetic oligonucleotide
accucaauagccugaaggaguucaa

SEQ ID NO: 2107 - RNA, 25 nt, Artificial Sequence
  Description of Artificial Sequence: Synthetic oligonucleotide
accuccagaacaugggauugccaga

SEQ ID NO: 2108 - RNA, 25 nt, Artificial Sequence
  Description of Artificial Sequence: Synthetic oligonucleotide
acuuccacaucccagaaaaccucuu

SEQ ID NO: 2109 - RNA, 25 nt, Artificial Sequence
  Description of Artificial Sequence: Synthetic oligonucleotide
ucuuaaaaagcgauggccgggucaa

SEQ ID NO: 2110 - RNA, 25 nt, Artificial Sequence
  Description of Artificial Sequence: Synthetic oligonucleotide
aauauaccuugaacaagaacaguuu

SEQ ID NO: 2111 - RNA, 25 nt, Artificial Sequence
  Description of Artificial Sequence: Synthetic oligonucleotide
ugaaaauugagauuccuuugccuuu

SEQ ID NO: 2112 - RNA, 25 nt, Artificial Sequence
  Description of Artificial Sequence: Synthetic oligonucleotide
uugguggcaaauccuccagagaucu

SEQ ID NO: 2113 - RNA, 25 nt, Artificial Sequence
  Description of Artificial Sequence: Synthetic oligonucleotide
uaaagauguuagagacuguuaggac

SEQ ID NO: 2114 - RNA, 25 nt, Artificial Sequence
  Description of Artificial Sequence: Synthetic oligonucleotide
caccagcccuccacuucaagucugu

SEQ ID NO: 2115 - RNA, 25 nt, Artificial Sequence
  Description of Artificial Sequence: Synthetic oligonucleotide
ugggauuccaucugccaucucgaga

SEQ ID NO: 2116 - RNA, 25 nt, Artificial Sequence
  Description of Artificial Sequence: Synthetic oligonucleotide
aguuccaagucccuacuuuuaccau

SEQ ID NO: 2117 - RNA, 25 nt, Artificial Sequence
  Description of Artificial Sequence: Synthetic oligonucleotide
uucccaaguuguaucaacugcaagu

SEQ ID NO: 2118 - RNA, 25 nt, Artificial Sequence
  Description of Artificial Sequence: Synthetic oligonucleotide
ugccucuccuggguguucuagaccu

SEQ ID NO: 2119 - RNA, 25 nt, Artificial Sequence
  Description of Artificial Sequence: Synthetic oligonucleotide
ucuccacgaaugucuacagcaacuu

SEQ ID NO: 2120 - RNA, 25 nt, Artificial Sequence
  Description of Artificial Sequence: Synthetic oligonucleotide
uguacaacugguccgccuccuacag

SEQ ID NO: 2121 - RNA, 25 nt, Artificial Sequence
  Description of Artificial Sequence: Synthetic oligonucleotide
gugguggcaacaccagcacagacca

SEQ ID NO: 2122 - RNA, 25 nt, Artificial Sequence
  Description of Artificial Sequence: Synthetic oligonucleotide
auuucagccuucgggcucguuacca

SEQ ID NO: 2123 - RNA, 25 nt, Artificial Sequence
  Description of Artificial Sequence: Synthetic oligonucleotide
acaugaaggcugacucugugguuga

SEQ ID NO: 2124 - RNA, 25 nt, Artificial Sequence
  Description of Artificial Sequence: Synthetic oligonucleotide
accugcuuuccuacaaugugcaagg

SEQ ID NO: 2125 - RNA, 25 nt, Artificial Sequence
  Description of Artificial Sequence: Synthetic oligonucleotide
gaucuggagaaacaacauaugacca

SEQ ID NO: 2126 - RNA, 25 nt, Artificial Sequence
  Description of Artificial Sequence: Synthetic oligonucleotide
acaagaauacguucacacuaucaug

SEQ ID NO: 2127 - RNA, 25 nt, Artificial Sequence
  Description of Artificial Sequence: Synthetic oligonucleotide
gugaugggucucuacgccacaaauu

SEQ ID NO: 2128 - RNA, 25 nt, Artificial Sequence
  Description of Artificial Sequence: Synthetic oligonucleotide
uucuagauucgaauaucaaauucag

SEQ ID NO: 2129 - RNA, 25 nt, Artificial Sequence
  Description of Artificial Sequence: Synthetic oligonucleotide
gucauguagaaaaacuuggaaacaa

SEQ ID NO: 2130 - RNA, 25 nt, Artificial Sequence
  Description of Artificial Sequence: Synthetic oligonucleotide
acccagucucaaaagguuuacuaau

SEQ ID NO: 2131 - RNA, 25 nt, Artificial Sequence
  Description of Artificial Sequence: Synthetic oligonucleotide
uauucgaugcaucuaguuccugggg

SEQ ID NO: 2132 - RNA, 25 nt, Artificial Sequence
  Description of Artificial Sequence: Synthetic oligonucleotide
gaccacagaugucugcuucaguuca

SEQ ID NO: 2133 - RNA, 25 nt, Artificial Sequence
  Description of Artificial Sequence: Synthetic oligonucleotide
auuuggacuccaaaaagaaacagca

SEQ ID NO: 2134 - RNA, 25 nt, Artificial Sequence
  Description of Artificial Sequence: Synthetic oligonucleotide
auuuguuugucaaagaagucaagau

SEQ ID NO: 2135 - RNA, 25 nt, Artificial Sequence
  Description of Artificial Sequence: Synthetic oligonucleotide
uugaugggcaguucagagucucuuc

SEQ ID NO: 2136 - RNA, 25 nt, Artificial Sequence
  Description of Artificial Sequence: Synthetic oligonucleotide
cguucuaugcuaaaggcacauaugg

SEQ ID NO: 2137 - RNA, 25 nt, Artificial Sequence
  Description of Artificial Sequence: Synthetic oligonucleotide
gccugucuugucagagggauccuaa

SEQ ID NO: 2138 - RNA, 25 nt, Artificial Sequence
  Description of Artificial Sequence: Synthetic oligonucleotide
acacuggccggcucaauggagaguc

SEQ ID NO: 2139 - RNA, 25 nt, Artificial Sequence
  Description of Artificial Sequence: Synthetic oligonucleotide
ccaaccugagguuuaacuccuccua

SEQ ID NO: 2140 - RNA, 25 nt, Artificial Sequence
  Description of Artificial Sequence: Synthetic oligonucleotide
accuccaaggcaccaaccagauaac

SEQ ID NO: 2141 - RNA, 25 nt, Artificial Sequence
  Description of Artificial Sequence: Synthetic oligonucleotide
caggaagauaugaagauggaacccu

SEQ ID NO: 2142 - RNA, 25 nt, Artificial Sequence
  Description of Artificial Sequence: Synthetic oligonucleotide
ucucccucaccuccaccucugaucu

SEQ ID NO: 2143 - RNA, 25 nt, Artificial Sequence
  Description of Artificial Sequence: Synthetic oligonucleotide
ugcaaaguggcaucauuaaaaauac

SEQ ID NO: 2144 - RNA, 25 nt, Artificial Sequence
  Description of Artificial Sequence: Synthetic oligonucleotide
cugcuucccuaaaguaugagaacua

SEQ ID NO: 2145 - RNA, 25 nt, Artificial Sequence
  Description of Artificial Sequence: Synthetic oligonucleotide
acgagcugacuuuaaaaucugacac

SEQ ID NO: 2146 - RNA, 25 nt, Artificial Sequence
  Description of Artificial Sequence: Synthetic oligonucleotide
ccaaugggaaguauaagaacuuugc

SEQ ID NO: 2147 - RNA, 25 nt, Artificial Sequence
  Description of Artificial Sequence: Synthetic oligonucleotide
ccacuucuaacaagauggauaugac

SEQ ID NO: 2148 - RNA, 25 nt, Artificial Sequence
  Description of Artificial Sequence: Synthetic oligonucleotide
ccuucucuaagcaaaaugcacugcu

SEQ ID NO: 2149 - RNA, 25 nt, Artificial Sequence
  Description of Artificial Sequence: Synthetic oligonucleotide
ugcguucugaauaucaggcugauua

SEQ ID NO: 2150 - RNA, 25 nt, Artificial Sequence
  Description of Artificial Sequence: Synthetic oligonucleotide
acgagucauugagguucuucagccu

SEQ ID NO: 2151 - RNA, 25 nt, Artificial Sequence
  Description of Artificial Sequence: Synthetic oligonucleotide
ugcuuucuggaucacuaaauuccca

SEQ ID NO: 2152 - RNA, 25 nt, Artificial Sequence
  Description of Artificial Sequence: Synthetic oligonucleotide
auggucuugaguuaaaugcugacau

SEQ ID NO: 2153 - RNA, 25 nt, Artificial Sequence
  Description of Artificial Sequence: Synthetic oligonucleotide
ucuuaggcacugacaaaauuaauag

SEQ ID NO: 2154 - RNA, 25 nt, Artificial Sequence
  Description of Artificial Sequence: Synthetic oligonucleotide
guggugcucacaaggcgacacuaag

SEQ ID NO: 2155 - RNA, 25 nt, Artificial Sequence
  Description of Artificial Sequence: Synthetic oligonucleotide
ggauuggccaagauggaauaucuac

SEQ ID NO: 2156 - RNA, 25 nt, Artificial Sequence
  Description of Artificial Sequence: Synthetic oligonucleotide
ccagugcaacgaccaacuugaagug

SEQ ID NO: 2157 - RNA, 25 nt, Artificial Sequence
  Description of Artificial Sequence: Synthetic oligonucleotide
guagucuccuggugcuggagaauga

SEQ ID NO: 2158 - RNA, 25 nt, Artificial Sequence
  Description of Artificial Sequence: Synthetic oligonucleotide
agcugaaugcagagcuuggccucuc

SEQ ID NO: 2159 - RNA, 25 nt, Artificial Sequence
  Description of Artificial Sequence: Synthetic oligonucleotide
cuggggcaucuaugaaauuaacaac

SEQ ID NO: 2160 - RNA, 25 nt, Artificial Sequence
  Description of Artificial Sequence: Synthetic oligonucleotide
caaauggccgcuucagggaacacaa

SEQ ID NO: 2161 - RNA, 25 nt, Artificial Sequence
  Description of Artificial Sequence: Synthetic oligonucleotide
augcaaaauucagucuggaugggaa

SEQ ID NO: 2162 - RNA, 25 nt, Artificial Sequence
  Description of Artificial Sequence: Synthetic oligonucleotide
aagccgcccucacagagcuaucacu

SEQ ID NO: 2163 - RNA, 25 nt, Artificial Sequence
  Description of Artificial Sequence: Synthetic oligonucleotide
ugggaagugcuuaucaggccaugau

SEQ ID NO: 2164 - RNA, 25 nt, Artificial Sequence
  Description of Artificial Sequence: Synthetic oligonucleotide
uucugggugucgacagcaaaaacau

SEQ ID NO: 2165 - RNA, 25 nt, Artificial Sequence
  Description of Artificial Sequence: Synthetic oligonucleotide
uuuucaacuucaaggucagucaaga

SEQ ID NO: 2166 - RNA, 25 nt, Artificial Sequence
  Description of Artificial Sequence: Synthetic oligonucleotide
aaggacuuaagcucucaaaugacau

SEQ ID NO: 2167 - RNA, 25 nt, Artificial Sequence
  Description of Artificial Sequence: Synthetic oligonucleotide
ugaugggcucauaugcugaaaugaa

SEQ ID NO: 2168 - RNA, 25 nt, Artificial Sequence
  Description of Artificial Sequence: Synthetic oligonucleotide
aauuugaccacacaaacagucugaa

SEQ ID NO: 2169 - RNA, 25 nt, Artificial Sequence
  Description of Artificial Sequence: Synthetic oligonucleotide
acauugcaggcuuaucacuggacuu

SEQ ID NO: 2170 - RNA, 25 nt, Artificial Sequence
  Description of Artificial Sequence: Synthetic oligonucleotide
ucucuucaaaacuugacaacauuua

SEQ ID NO: 2171 - RNA, 25 nt, Artificial Sequence
  Description of Artificial Sequence: Synthetic oligonucleotide
acagcucugacaaguuuuauaagca

SEQ ID NO: 2172 - RNA, 25 nt, Artificial Sequence
  Description of Artificial Sequence: Synthetic oligonucleotide
aaacuguuaauuuacagcuacagcc

SEQ ID NO: 2173 - RNA, 25 nt, Artificial Sequence
  Description of Artificial Sequence: Synthetic oligonucleotide
ccuauucucugguaacuacuuuaaa

SEQ ID NO: 2174 - RNA, 25 nt, Artificial Sequence
  Description of Artificial Sequence: Synthetic oligonucleotide
acagugaccugaaauacaaugcucu

SEQ ID NO: 2175 - RNA, 25 nt, Artificial Sequence
  Description of Artificial Sequence: Synthetic oligonucleotide
uggaucucaccaacaaugggaaacu

SEQ ID NO: 2176 - RNA, 25 nt, Artificial Sequence
  Description of Artificial Sequence: Synthetic oligonucleotide
uacggcuagaaccccugaagcugca

SEQ ID NO: 2177 - RNA, 25 nt, Artificial Sequence
  Description of Artificial Sequence: Synthetic oligonucleotide
auguggcugguaaccuaaaaggagc

SEQ ID NO: 2178 - RNA, 25 nt, Artificial Sequence
  Description of Artificial Sequence: Synthetic oligonucleotide
ccuaccaaaauaaugaaauaaaaca

SEQ ID NO: 2179 - RNA, 25 nt, Artificial Sequence
  Description of Artificial Sequence: Synthetic oligonucleotide
acaucuaugccaucucuucugcugc

SEQ ID NO: 2180 - RNA, 25 nt, Artificial Sequence
  Description of Artificial Sequence: Synthetic oligonucleotide
ccuuaucagcaagcuauaaagcaga

SEQ ID NO: 2181 - RNA, 25 nt, Artificial Sequence
  Description of Artificial Sequence: Synthetic oligonucleotide
acacuguugcuaagguucagggugu

SEQ ID NO: 2182 - RNA, 25 nt, Artificial Sequence
  Description of Artificial Sequence: Synthetic oligonucleotide
uggaguuuagccaucggcucaacac

SEQ ID NO: 2183 - RNA, 25 nt, Artificial Sequence
  Description of Artificial Sequence: Synthetic oligonucleotide
cagacaucgcugggcuggcuucagc

SEQ ID NO: 2184 - RNA, 25 nt, Artificial Sequence
  Description of Artificial Sequence: Synthetic oligonucleotide
ccauugacaugagcacaaacuauaa

SEQ ID NO: 2185 - RNA, 25 nt, Artificial Sequence
  Description of Artificial Sequence: Synthetic oligonucleotide
auucagacucacugcauuucagcaa

SEQ ID NO: 2186 - RNA, 25 nt, Artificial Sequence
  Description of Artificial Sequence: Synthetic oligonucleotide
augucuuccguucuguaauggcccc

SEQ ID NO: 2187 - RNA, 25 nt, Artificial Sequence
  Description of Artificial Sequence: Synthetic oligonucleotide
cguuuaccaugaccaucgaugcaca

SEQ ID NO: 2188 - RNA, 25 nt, Artificial Sequence
  Description of Artificial Sequence: Synthetic oligonucleotide
auacaaauggcaaugggaaacucgc

SEQ ID NO: 2189 - RNA, 25 nt, Artificial Sequence
  Description of Artificial Sequence: Synthetic oligonucleotide
cucucuggggagaacauacugggca

SEQ ID NO: 2190 - RNA, 25 nt, Artificial Sequence
  Description of Artificial Sequence: Synthetic oligonucleotide
agcuguauagcaaauuccuguugaa

SEQ ID NO: 2191 - RNA, 25 nt, Artificial Sequence
  Description of Artificial Sequence: Synthetic oligonucleotide
aagcagaaccucuggcauuuacuuu

SEQ ID NO: 2192 - RNA, 25 nt, Artificial Sequence
  Description of Artificial Sequence: Synthetic oligonucleotide
ucucucaugauuacaaaggcuccac

SEQ ID NO: 2193 - RNA, 25 nt, Artificial Sequence
  Description of Artificial Sequence: Synthetic oligonucleotide
caagucaucaucucgugucuaggaa

SEQ ID NO: 2194 - RNA, 25 nt, Artificial Sequence
  Description of Artificial Sequence: Synthetic oligonucleotide
aaagcaucagugcagcucuugaaca

SEQ ID NO: 2195 - RNA, 25 nt, Artificial Sequence
  Description of Artificial Sequence: Synthetic oligonucleotide
acaaagucagugcccugcuuacucc

SEQ ID NO: 2196 - RNA, 25 nt, Artificial Sequence
  Description of Artificial Sequence: Synthetic oligonucleotide
cagcugagcagacaggcaccuggaa

SEQ ID NO: 2197 - RNA, 25 nt, Artificial Sequence
  Description of Artificial Sequence: Synthetic oligonucleotide
aacucaagacccaauuuaacaacaa

SEQ ID NO: 2198 - RNA, 25 nt, Artificial Sequence
  Description of Artificial Sequence: Synthetic oligonucleotide
augaauacagccaggacuuggaugc

SEQ ID NO: 2199 - RNA, 25 nt, Artificial Sequence
  Description of Artificial Sequence: Synthetic oligonucleotide
cuuacaacacuaaagauaaaauugg

SEQ ID NO: 2200 - RNA, 25 nt, Artificial Sequence
  Description of Artificial Sequence: Synthetic oligonucleotide
gcguggagcuuacuggacgaacucu

SEQ ID NO: 2201 - RNA, 25 nt, Artificial Sequence
  Description of Artificial Sequence: Synthetic oligonucleotide
uggcugaccuaacucuacuagacuc

SEQ ID NO: 2202 - RNA, 25 nt, Artificial Sequence
  Description of Artificial Sequence: Synthetic oligonucleotide
ccccaauuaaagugccacuuuuacu

SEQ ID NO: 2203 - RNA, 25 nt, Artificial Sequence
  Description of Artificial Sequence: Synthetic oligonucleotide
ucagugagcccaucaauaucauuga

SEQ ID NO: 2204 - RNA, 25 nt, Artificial Sequence
  Description of Artificial Sequence: Synthetic oligonucleotide
augcuuuagagaugagagaugccgu

SEQ ID NO: 2205 - RNA, 25 nt, Artificial Sequence
  Description of Artificial Sequence: Synthetic oligonucleotide
uugagaagccccaagaauuuacaau

SEQ ID NO: 2206 - RNA, 25 nt, Artificial Sequence
  Description of Artificial Sequence: Synthetic oligonucleotide
uuguugcuuuuguaaaguaugauaa

SEQ ID NO: 2207 - RNA, 25 nt, Artificial Sequence
  Description of Artificial Sequence: Synthetic oligonucleotide
aaaaccaagauguucacuccauuaa

SEQ ID NO: 2208 - RNA, 25 nt, Artificial Sequence
  Description of Artificial Sequence: Synthetic oligonucleotide
accucccauuuuuugagaccuugca

SEQ ID NO: 2209 - RNA, 25 nt, Artificial Sequence
  Description of Artificial Sequence: Synthetic oligonucleotide
aagaauauuuugagaggaaucgaca

SEQ ID NO: 2210 - RNA, 25 nt, Artificial Sequence
  Description of Artificial Sequence: Synthetic oligonucleotide
aaaccauuauaguuguacuggaaaa

SEQ ID NO: 2211 - RNA, 25 nt, Artificial Sequence
  Description of Artificial Sequence: Synthetic oligonucleotide
acguacagagaaaccugaagcacau

SEQ ID NO: 2212 - RNA, 25 nt, Artificial Sequence
  Description of Artificial Sequence: Synthetic oligonucleotide
ucaauauugaucaauuuguaagaaa

SEQ ID NO: 2213 - RNA, 25 nt, Artificial Sequence
  Description of Artificial Sequence: Synthetic oligonucleotide
aauacagagcagcccugggaaaacu

SEQ ID NO: 2214 - RNA, 25 nt, Artificial Sequence
  Description of Artificial Sequence: Synthetic oligonucleotide
ucccacagcaagcuaaugauuaucu

SEQ ID NO: 2215 - RNA, 25 nt, Artificial Sequence
  Description of Artificial Sequence: Synthetic oligonucleotide
ugaauucauucaauugggagagaca

SEQ ID NO: 2216 - RNA, 25 nt, Artificial Sequence
  Description of Artificial Sequence: Synthetic oligonucleotide
aaguuucacaugccaaggagaaacu

SEQ ID NO: 2217 - RNA, 25 nt, Artificial Sequence
  Description of Artificial Sequence: Synthetic oligonucleotide
ugacugcucucacaaaaaaguauag

SEQ ID NO: 2218 - RNA, 25 nt, Artificial Sequence
  Description of Artificial Sequence: Synthetic oligonucleotide
gaauuacagaaaaugauauacaaau

SEQ ID NO: 2219 - RNA, 25 nt, Artificial Sequence
  Description of Artificial Sequence: Synthetic oligonucleotide
uugcauuagaugaugccaaaaucaa

SEQ ID NO: 2220 - RNA, 25 nt, Artificial Sequence
  Description of Artificial Sequence: Synthetic oligonucleotide
acuuuaaugaaaaacuaucucaacu

SEQ ID NO: 2221 - RNA, 25 nt, Artificial Sequence
  Description of Artificial Sequence: Synthetic oligonucleotide
ugcagacauauaugauacaauuuga

SEQ ID NO: 2222 - RNA, 25 nt, Artificial Sequence
  Description of Artificial Sequence: Synthetic oligonucleotide
aucaguauauuaaagauaguuauga

SEQ ID NO: 2223 - RNA, 25 nt, Artificial Sequence
  Description of Artificial Sequence: Synthetic oligonucleotide
auuuacaugauuugaaaauagcuau

SEQ ID NO: 2224 - RNA, 25 nt, Artificial Sequence
  Description of Artificial Sequence: Synthetic oligonucleotide
uugcuaauauuauugaugaaaucau

SEQ ID NO: 2225 - RNA, 25 nt, Artificial Sequence
  Description of Artificial Sequence: Synthetic oligonucleotide
uugaaaaauuaaaaagucuugauga

SEQ ID NO: 2226 - RNA, 25 nt, Artificial Sequence
  Description of Artificial Sequence: Synthetic oligonucleotide
agcacuaucauauccguguaaauuu

SEQ ID NO: 2227 - RNA, 25 nt, Artificial Sequence
  Description of Artificial Sequence: Synthetic oligonucleotide
uaguaaaaacaauccaugaucuaca

SEQ ID NO: 2228 - RNA, 25 nt, Artificial Sequence
  Description of Artificial Sequence: Synthetic oligonucleotide
auuuguuuauugaaaauauugauuu

SEQ ID NO: 2229 - RNA, 25 nt, Artificial Sequence
  Description of Artificial Sequence: Synthetic oligonucleotide
uuaacaaaaguggaaguaguacugc

SEQ ID NO: 2230 - RNA, 25 nt, Artificial Sequence
  Description of Artificial Sequence: Synthetic oligonucleotide
cauccuggauucaaaauguggauac

SEQ ID NO: 2231 - RNA, 25 nt, Artificial Sequence
  Description of Artificial Sequence: Synthetic oligonucleotide
cuaaguaccaaaucagaauccagau

SEQ ID NO: 2232 - RNA, 25 nt, Artificial Sequence
  Description of Artificial Sequence: Synthetic oligonucleotide
uacaagaaaaacugcagcagcuuaa

SEQ ID NO: 2233 - RNA, 25 nt, Artificial Sequence
  Description of Artificial Sequence: Synthetic oligonucleotide
agagacacauacagaauauagacau

SEQ ID NO: 2234 - RNA, 25 nt, Artificial Sequence
  Description of Artificial Sequence: Synthetic oligonucleotide
uccagcaccuagcuggaaaguuaaa

SEQ ID NO: 2235 - RNA, 25 nt, Artificial Sequence
  Description of Artificial Sequence: Synthetic oligonucleotide
aacaacacauugaggcuauugaugu

SEQ ID NO: 2236 - RNA, 25 nt, Artificial Sequence
  Description of Artificial Sequence: Synthetic oligonucleotide
uuagagugcuuuuagaucaauuggg

SEQ ID NO: 2237 - RNA, 25 nt, Artificial Sequence
  Description of Artificial Sequence: Synthetic oligonucleotide
gaacuacaauuucauuugaaagaau

SEQ ID NO: 2238 - RNA, 25 nt, Artificial Sequence
  Description of Artificial Sequence: Synthetic oligonucleotide
uaaaugacguucuugagcaugucaa

SEQ ID NO: 2239 - RNA, 25 nt, Artificial Sequence
  Description of Artificial Sequence: Synthetic oligonucleotide
aacacuuuguuauaaaucuuauugg

SEQ ID NO: 2240 - RNA, 25 nt, Artificial Sequence
  Description of Artificial Sequence: Synthetic oligonucleotide
gggauuuugaaguagcugagaaaau

SEQ ID NO: 2241 - RNA, 25 nt, Artificial Sequence
  Description of Artificial Sequence: Synthetic oligonucleotide
ucaaugccuucagagccaaagucca

SEQ ID NO: 2242 - RNA, 25 nt, Artificial Sequence
  Description of Artificial Sequence: Synthetic oligonucleotide
augaguuaaucgagagguaugaagu

SEQ ID NO: 2243 - RNA, 25 nt, Artificial Sequence
  Description of Artificial Sequence: Synthetic oligonucleotide
uagaccaacaaauccagguuuuaau

SEQ ID NO: 2244 - RNA, 25 nt, Artificial Sequence
  Description of Artificial Sequence: Synthetic oligonucleotide
uggauaaauuaguagaguuggccca

SEQ ID NO: 2245 - RNA, 25 nt, Artificial Sequence
  Description of Artificial Sequence: Synthetic oligonucleotide
accaauacaaguugaaggagacuau

SEQ ID NO: 2246 - RNA, 25 nt, Artificial Sequence
  Description of Artificial Sequence: Synthetic oligonucleotide
uucagaagcuaagcaauguccuaca

SEQ ID NO: 2247 - RNA, 25 nt, Artificial Sequence
  Description of Artificial Sequence: Synthetic oligonucleotide
aacaaguuaagauaaaagauuacuu

SEQ ID NO: 2248 - RNA, 25 nt, Artificial Sequence
  Description of Artificial Sequence: Synthetic oligonucleotide
uugagaaauugguuggauuuauuga

SEQ ID NO: 2249 - RNA, 25 nt, Artificial Sequence
  Description of Artificial Sequence: Synthetic oligonucleotide
augaugcugucaagaagcuuaauga

SEQ ID NO: 2250 - RNA, 25 nt, Artificial Sequence
  Description of Artificial Sequence: Synthetic oligonucleotide
aauuaucuuuuaaaacauucauuga

SEQ ID NO: 2251 - RNA, 25 nt, Artificial Sequence
  Description of Artificial Sequence: Synthetic oligonucleotide
aagauguuaacaaauuccuugacau

SEQ ID NO: 2252 - RNA, 25 nt, Artificial Sequence
  Description of Artificial Sequence: Synthetic oligonucleotide
uguugauaaagaaauuaaagucauu

SEQ ID NO: 2253 - RNA, 25 nt, Artificial Sequence
  Description of Artificial Sequence: Synthetic oligonucleotide
uugauuaccaccaguuuguagauga

SEQ ID NO: 2254 - RNA, 25 nt, Artificial Sequence
  Description of Artificial Sequence: Synthetic oligonucleotide
aaaccaaugacaaaauccgugaggu

SEQ ID NO: 2255 - RNA, 25 nt, Artificial Sequence
  Description of Artificial Sequence: Synthetic oligonucleotide
ugacucagagacucaauggugaaau

SEQ ID NO: 2256 - RNA, 25 nt, Artificial Sequence
  Description of Artificial Sequence: Synthetic oligonucleotide
uucaggcucuggaacuaccacaaaa

SEQ ID NO: 2257 - RNA, 25 nt, Artificial Sequence
  Description of Artificial Sequence: Synthetic oligonucleotide
aagcugaagcauuaaaacuguuuuu

SEQ ID NO: 2258 - RNA, 25 nt, Artificial Sequence
  Description of Artificial Sequence: Synthetic oligonucleotide
uagaggaaaccaaggccacaguugc

SEQ ID NO: 2259 - RNA, 25 nt, Artificial Sequence
  Description of Artificial Sequence: Synthetic oligonucleotide
caguguaucuggaaagccuacagga

SEQ ID NO: 2260 - RNA, 25 nt, Artificial Sequence
  Description of Artificial Sequence: Synthetic oligonucleotide
acaccaaaauaaccuuaaucaucaa

SEQ ID NO: 2261 - RNA, 25 nt, Artificial Sequence
  Description of Artificial Sequence: Synthetic oligonucleotide
auugguuacaggaggcuuuaaguuc

SEQ ID NO: 2262 - RNA, 25 nt, Artificial Sequence
  Description of Artificial Sequence: Synthetic oligonucleotide
cagcaucuuuggcucacaugaaggc

SEQ ID NO: 2263 - RNA, 25 nt, Artificial Sequence
  Description of Artificial Sequence: Synthetic oligonucleotide
ccaaauuccgagagacccuagaaga

SEQ ID NO: 2264 - RNA, 25 nt, Artificial Sequence
  Description of Artificial Sequence: Synthetic oligonucleotide
auacacgagaccgaauguaucaaau

SEQ ID NO: 2265 - RNA, 25 nt, Artificial Sequence
  Description of Artificial Sequence: Synthetic oligonucleotide
uggacauucagcaggaacuucaacg

SEQ ID NO: 2266 - RNA, 25 nt, Artificial Sequence
  Description of Artificial Sequence: Synthetic oligonucleotide
gauaccugucucugguaggccaggu

SEQ ID NO: 2267 - RNA, 25 nt, Artificial Sequence
  Description of Artificial Sequence: Synthetic oligonucleotide
uuuauagcacacuugucaccuacau

SEQ ID NO: 2268 - RNA, 25 nt, Artificial Sequence
  Description of Artificial Sequence: Synthetic oligonucleotide
uuucugauugguggacucuugcugc

SEQ ID NO: 2269 - RNA, 25 nt, Artificial Sequence
  Description of Artificial Sequence: Synthetic oligonucleotide
cuaagaaccuuacugacuuugcaga

SEQ ID NO: 2270 - RNA, 25 nt, Artificial Sequence
  Description of Artificial Sequence: Synthetic oligonucleotide
agcaauauucuauccaagauugggc

SEQ ID NO: 2271 - RNA, 25 nt, Artificial Sequence
  Description of Artificial Sequence: Synthetic oligonucleotide
cuaaacguaugaaagcauugguaga

SEQ ID NO: 2272 - RNA, 25 nt, Artificial Sequence
  Description of Artificial Sequence: Synthetic oligonucleotide
agcaaggguucacuguuccugaaau

SEQ ID NO: 2273 - RNA, 25 nt, Artificial Sequence
  Description of Artificial Sequence: Synthetic oligonucleotide
ucaagaccauccuugggaccaugcc

SEQ ID NO: 2274 - RNA, 25 nt, Artificial Sequence
  Description of Artificial Sequence: Synthetic oligonucleotide
cugccuuugaagucagucuucaggc

SEQ ID NO: 2275 - RNA, 25 nt, Artificial Sequence
  Description of Artificial Sequence: Synthetic oligonucleotide
cucuucagaaagcuaccuuccagac

SEQ ID NO: 2276 - RNA, 25 nt, Artificial Sequence
  Description of Artificial Sequence: Synthetic oligonucleotide
caccugauuuuauagucccccuaac

SEQ ID NO: 2277 - RNA, 25 nt, Artificial Sequence
  Description of Artificial Sequence: Synthetic oligonucleotide
cagauuugaggauuccaucaguuca

SEQ ID NO: 2278 - RNA, 25 nt, Artificial Sequence
  Description of Artificial Sequence: Synthetic oligonucleotide
agauaaacuucaaagacuuaaaaaa

SEQ ID NO: 2279 - RNA, 25 nt, Artificial Sequence
  Description of Artificial Sequence: Synthetic oligonucleotide
auauaaaaaucccauccagguuuuc

SEQ ID NO: 2280 - RNA, 25 nt, Artificial Sequence
  Description of Artificial Sequence: Synthetic oligonucleotide
ccacaccagaauuuaccauccuuaa

SEQ ID NO: 2281 - RNA, 25 nt, Artificial Sequence
  Description of Artificial Sequence: Synthetic oligonucleotide
acaccuuccacauuccuuccuuuac

SEQ ID NO: 2282 - RNA, 25 nt, Artificial Sequence
  Description of Artificial Sequence: Synthetic oligonucleotide
caauugacuuuguagaaaugaaagu

SEQ ID NO: 2283 - RNA, 25 nt, Artificial Sequence
  Description of Artificial Sequence: Synthetic oligonucleotide
uaaagaucaucagaaccauugacca

SEQ ID NO: 2284 - RNA, 25 nt, Artificial Sequence
  Description of Artificial Sequence: Synthetic oligonucleotide
agaugcugaacagugagcugcagug

SEQ ID NO: 2285 - RNA, 25 nt, Artificial Sequence
  Description of Artificial Sequence: Synthetic oligonucleotide
ggcccguuccagauauauaucucag

SEQ ID NO: 2286 - RNA, 25 nt, Artificial Sequence
  Description of Artificial Sequence: Synthetic oligonucleotide
gggaucugaagguggaggacauucc

SEQ ID NO: 2287 - RNA, 25 nt, Artificial Sequence
  Description of Artificial Sequence: Synthetic oligonucleotide
cucuagcgagaaucacccugccaga

SEQ ID NO: 2288 - RNA, 25 nt, Artificial Sequence
  Description of Artificial Sequence: Synthetic oligonucleotide
acuuccguuuaccagaaaucgcaau

SEQ ID NO: 2289 - RNA, 25 nt, Artificial Sequence
  Description of Artificial Sequence: Synthetic oligonucleotide
uuccagaauucauaaucccaacucu

SEQ ID NO: 2290 - RNA, 25 nt, Artificial Sequence
  Description of Artificial Sequence: Synthetic oligonucleotide
ucaaccuuaaugauuuucaaguucc

SEQ ID NO: 2291 - RNA, 25 nt, Artificial Sequence
  Description of Artificial Sequence: Synthetic oligonucleotide
cugaccuucacauaccagaauucca

SEQ ID NO: 2292 - RNA, 25 nt, Artificial Sequence
  Description of Artificial Sequence: Synthetic oligonucleotide
agcuuccccacaucucacacacaau

SEQ ID NO: 2293 - RNA, 25 nt, Artificial Sequence
  Description of Artificial Sequence: Synthetic oligonucleotide
uugaaguaccuacuuuuggcaagcu

SEQ ID NO: 2294 - RNA, 25 nt, Artificial Sequence
  Description of Artificial Sequence: Synthetic oligonucleotide
uauacaguauucugaaaauccaauc

SEQ ID NO: 2295 - RNA, 25 nt, Artificial Sequence
  Description of Artificial Sequence: Synthetic oligonucleotide
cuccucuuuucacauuagaugcaaa

SEQ ID NO: 2296 - RNA, 25 nt, Artificial Sequence
  Description of Artificial Sequence: Synthetic oligonucleotide
augcugacauagggaauggaaccac

SEQ ID NO: 2297 - RNA, 25 nt, Artificial Sequence
  Description of Artificial Sequence: Synthetic oligonucleotide
ccucagcaaacgaagcagguaucgc

SEQ ID NO: 2298 - RNA, 25 nt, Artificial Sequence
  Description of Artificial Sequence: Synthetic oligonucleotide
cagcuuccaucacugccaaaggaga

SEQ ID NO: 2299 - RNA, 25 nt, Artificial Sequence
  Description of Artificial Sequence: Synthetic oligonucleotide
aguccaaauuagaaguucucaauuu

SEQ ID NO: 2300 - RNA, 25 nt, Artificial Sequence
  Description of Artificial Sequence: Synthetic oligonucleotide
uugauuuucaagcaaaugcacaacu

SEQ ID NO: 2301 - RNA, 25 nt, Artificial Sequence
  Description of Artificial Sequence: Synthetic oligonucleotide
ucucaaacccuaagauuaauccgcu

SEQ ID NO: 2302 - RNA, 25 nt, Artificial Sequence
  Description of Artificial Sequence: Synthetic oligonucleotide
uggcucugaaggagucagugaaguu

SEQ ID NO: 2303 - RNA, 25 nt, Artificial Sequence
  Description of Artificial Sequence: Synthetic oligonucleotide
ucuccagcaaguaccugagaacgga

SEQ ID NO: 2304 - RNA, 25 nt, Artificial Sequence
  Description of Artificial Sequence: Synthetic oligonucleotide
agcaugggagugaaaugcuguuuuu

SEQ ID NO: 2305 - RNA, 25 nt, Artificial Sequence
  Description of Artificial Sequence: Synthetic oligonucleotide
uuggaaaugcuauugagggaaaauc

SEQ ID NO: 2306 - RNA, 25 nt, Artificial Sequence
  Description of Artificial Sequence: Synthetic oligonucleotide
caaacacaguggcaaguuuacacac

SEQ ID NO: 2307 - RNA, 25 nt, Artificial Sequence
  Description of Artificial Sequence: Synthetic oligonucleotide
cagaaaaaaauacacuggagcuuag

SEQ ID NO: 2308 - RNA, 25 nt, Artificial Sequence
  Description of Artificial Sequence: Synthetic oligonucleotide
guaauggagugauugucaagauaaa

SEQ ID NO: 2309 - RNA, 25 nt, Artificial Sequence
  Description of Artificial Sequence: Synthetic oligonucleotide
acaaucagcuuacccuggauagcaa

SEQ ID NO: 2310 - RNA, 25 nt, Artificial Sequence
  Description of Artificial Sequence: Synthetic oligonucleotide
acacuaaauacuuccacaaauugaa

SEQ ID NO: 2311 - RNA, 25 nt, Artificial Sequence
  Description of Artificial Sequence: Synthetic oligonucleotide
acauccccaaacuggacuucucuag

SEQ ID NO: 2312 - RNA, 25 nt, Artificial Sequence
  Description of Artificial Sequence: Synthetic oligonucleotide
gucaggcugaccugcgcaacgagau

SEQ ID NO: 2313 - RNA, 25 nt, Artificial Sequence
  Description of Artificial Sequence: Synthetic oligonucleotide
ucaagacacuguugaaagcuggcca

SEQ ID NO: 2314 - RNA, 25 nt, Artificial Sequence
  Description of Artificial Sequence: Synthetic oligonucleotide
acauagcauggacuucuucuggaaa

SEQ ID NO: 2315 - RNA, 25 nt, Artificial Sequence
  Description of Artificial Sequence: Synthetic oligonucleotide
aagggucauggaaaugggccugccc

SEQ ID NO: 2316 - RNA, 25 nt, Artificial Sequence
  Description of Artificial Sequence: Synthetic oligonucleotide
ccagauucucagaugagggaacaca

SEQ ID NO: 2317 - RNA, 25 nt, Artificial Sequence
  Description of Artificial Sequence: Synthetic oligonucleotide
augaaucacaaauuaguuucaccau

SEQ ID NO: 2318 - RNA, 25 nt, Artificial Sequence
  Description of Artificial Sequence: Synthetic oligonucleotide
uagaaggaccccucacuuccuuugg

SEQ ID NO: 2319 - RNA, 25 nt, Artificial Sequence
  Description of Artificial Sequence: Synthetic oligonucleotide
gacuguccaauaagaucaauagcaa

SEQ ID NO: 2320 - RNA, 25 nt, Artificial Sequence
  Description of Artificial Sequence: Synthetic oligonucleotide
aacaccuaagaguaaaccaaaacuu

SEQ ID NO: 2321 - RNA, 25 nt, Artificial Sequence
  Description of Artificial Sequence: Synthetic oligonucleotide
ugguuuaugaaucuggcucccucaa

SEQ ID NO: 2322 - RNA, 25 nt, Artificial Sequence
  Description of Artificial Sequence: Synthetic oligonucleotide
acuuuucuaaacuugaaauucaauc

SEQ ID NO: 2323 - RNA, 25 nt, Artificial Sequence
  Description of Artificial Sequence: Synthetic oligonucleotide
cacaagucgauucccagcauguggg

SEQ ID NO: 2324 - RNA, 25 nt, Artificial Sequence
  Description of Artificial Sequence: Synthetic oligonucleotide
gccacaguguucuaacugcuaaagg

SEQ ID NO: 2325 - RNA, 25 nt, Artificial Sequence
  Description of Artificial Sequence: Synthetic oligonucleotide
gcauggcacuguuuggagaagggaa

SEQ ID NO: 2326 - RNA, 25 nt, Artificial Sequence
  Description of Artificial Sequence: Synthetic oligonucleotide
aggcagaguuuacugggaggcauga

SEQ ID NO: 2327 - RNA, 25 nt, Artificial Sequence
  Description of Artificial Sequence: Synthetic oligonucleotide
augcucauuuaaauggaaagguuau

SEQ ID NO: 2328 - RNA, 25 nt, Artificial Sequence
  Description of Artificial Sequence: Synthetic oligonucleotide
uuggaacuuugaaaaauucucuuuu

SEQ ID NO: 2329 - RNA, 25 nt, Artificial Sequence
  Description of Artificial Sequence: Synthetic oligonucleotide
ucuuuucagcccagccauuugagau

SEQ ID NO: 2330 - RNA, 25 nt, Artificial Sequence
  Description of Artificial Sequence: Synthetic oligonucleotide
ucacggcauccacaaacaaugaagg

SEQ ID NO: 2331 - RNA, 25 nt, Artificial Sequence
  Description of Artificial Sequence: Synthetic oligonucleotide
ggaauuugaaaguucguuuuccauu

SEQ ID NO: 2332 - RNA, 25 nt, Artificial Sequence
  Description of Artificial Sequence: Synthetic oligonucleotide
uaagguuaacagggaagauagacuu

SEQ ID NO: 2333 - RNA, 25 nt, Artificial Sequence
  Description of Artificial Sequence: Synthetic oligonucleotide
uccugaauaacuaugcacuguuucu

SEQ ID NO: 2334 - RNA, 25 nt, Artificial Sequence
  Description of Artificial Sequence: Synthetic oligonucleotide
ugagucccagugcccagcaagcaag

SEQ ID NO: 2335 - RNA, 25 nt, Artificial Sequence
  Description of Artificial Sequence: Synthetic oligonucleotide
guuggcaaguaagugcuagguucaa

SEQ ID NO: 2336 - RNA, 25 nt, Artificial Sequence
  Description of Artificial Sequence: Synthetic oligonucleotide
aucaguauaaguacaaccaaaauuu

SEQ ID NO: 2337 - RNA, 25 nt, Artificial Sequence
  Description of Artificial Sequence: Synthetic oligonucleotide
ucucugcuggaaacaacgagaacau

SEQ ID NO: 2338 - RNA, 25 nt, Artificial Sequence
  Description of Artificial Sequence: Synthetic oligonucleotide
uuauggaggcccauguaggaauaaa

SEQ ID NO: 2339 - RNA, 25 nt, Artificial Sequence
  Description of Artificial Sequence: Synthetic oligonucleotide
auggagaagcaaaucuggauuucuu

SEQ ID NO: 2340 - RNA, 25 nt, Artificial Sequence
  Description of Artificial Sequence: Synthetic oligonucleotide
uaaacauuccuuuaacaauuccuga

SEQ ID NO: 2341 - RNA, 25 nt, Artificial Sequence
  Description of Artificial Sequence: Synthetic oligonucleotide
aaaugcgucuaccuuacacaauaau

SEQ ID NO: 2342 - RNA, 25 nt, Artificial Sequence
  Description of Artificial Sequence: Synthetic oligonucleotide
ucacaacuccuccacugaaagauuu

SEQ ID NO: 2343 - RNA, 25 nt, Artificial Sequence
  Description of Artificial Sequence: Synthetic oligonucleotide
ucucucuaugggaaaaaacaggcuu

SEQ ID NO: 2344 - RNA, 25 nt, Artificial Sequence
  Description of Artificial Sequence: Synthetic oligonucleotide
ugaaggaauucuugaaaacgacaaa

SEQ ID NO: 2345 - RNA, 25 nt, Artificial Sequence
  Description of Artificial Sequence: Synthetic oligonucleotide
agcaaucauuugauuuaaguguaaa

SEQ ID NO: 2346 - RNA, 25 nt, Artificial Sequence
  Description of Artificial Sequence: Synthetic oligonucleotide
aagcucaguauaagaaaaacaaaca

SEQ ID NO: 2347 - RNA, 25 nt, Artificial Sequence
  Description of Artificial Sequence: Synthetic oligonucleotide
acaggcauuccaucacaaauccuuu

SEQ ID NO: 2348 - RNA, 25 nt, Artificial Sequence
  Description of Artificial Sequence: Synthetic oligonucleotide
uggcugugcuuugugaguuuaucag

SEQ ID NO: 2349 - RNA, 25 nt, Artificial Sequence
  Description of Artificial Sequence: Synthetic oligonucleotide
gucagagcaucaaauccuuugacag

SEQ ID NO: 2350 - RNA, 25 nt, Artificial Sequence
  Description of Artificial Sequence: Synthetic oligonucleotide
ggcauuuugaaaaaaacagaaacaa

SEQ ID NO: 2351 - RNA, 25 nt, Artificial Sequence
  Description of Artificial Sequence: Synthetic oligonucleotide
augcauuagauuuugucaccaaauc

SEQ ID NO: 2352 - RNA, 25 nt, Artificial Sequence
  Description of Artificial Sequence: Synthetic oligonucleotide
ccuauaaugaaacaaaaauuaaguu

SEQ ID NO: 2353 - RNA, 25 nt, Artificial Sequence
  Description of Artificial Sequence: Synthetic oligonucleotide
uugauaaguacaaagcugaaaaauc

SEQ ID NO: 2354 - RNA, 25 nt, Artificial Sequence
  Description of Artificial Sequence: Synthetic oligonucleotide
cucacgacgagcuccccaggaccuu

SEQ ID NO: 2355 - RNA, 25 nt, Artificial Sequence
  Description of Artificial Sequence: Synthetic oligonucleotide
uucaaauuccuggauacacuguucc

SEQ ID NO: 2356 - RNA, 25 nt, Artificial Sequence
  Description of Artificial Sequence: Synthetic oligonucleotide
caguugucaauguugaagugucucc

SEQ ID NO: 2357 - RNA, 25 nt, Artificial Sequence
  Description of Artificial Sequence: Synthetic oligonucleotide
cauucaccauagagaugucggcauu

SEQ ID NO: 2358 - RNA, 25 nt, Artificial Sequence
  Description of Artificial Sequence: Synthetic oligonucleotide
ucggcuauguguucccaaaagcagu

SEQ ID NO: 2359 - RNA, 25 nt, Artificial Sequence
  Description of Artificial Sequence: Synthetic oligonucleotide
ucagcaugccuaguuucuccauccu

SEQ ID NO: 2360 - RNA, 25 nt, Artificial Sequence
  Description of Artificial Sequence: Synthetic oligonucleotide
uagguucugacguccgugugccuuc

SEQ ID NO: 2361 - RNA, 25 nt, Artificial Sequence
  Description of Artificial Sequence: Synthetic oligonucleotide
cauacacauuaauccugccaucauu

SEQ ID NO: 2362 - RNA, 25 nt, Artificial Sequence
  Description of Artificial Sequence: Synthetic oligonucleotide
uagagcugccaguccuucauguccc

SEQ ID NO: 2363 - RNA, 25 nt, Artificial Sequence
  Description of Artificial Sequence: Synthetic oligonucleotide
cuagaaaucucaagcuuucucuucc

SEQ ID NO: 2364 - RNA, 25 nt, Artificial Sequence
  Description of Artificial Sequence: Synthetic oligonucleotide
cagauuucaaggaauuguguaccau

SEQ ID NO: 2365 - RNA, 25 nt, Artificial Sequence
  Description of Artificial Sequence: Synthetic oligonucleotide
uaagccauauuuuuauuccugccau

SEQ ID NO: 2366 - RNA, 25 nt, Artificial Sequence
  Description of Artificial Sequence: Synthetic oligonucleotide
ugggcaauauuaccuaugauuucuc

SEQ ID NO: 2367 - RNA, 25 nt, Artificial Sequence
  Description of Artificial Sequence: Synthetic oligonucleotide
ccuuuaaaucaagugucaucacacu

SEQ ID NO: 2368 - RNA, 25 nt, Artificial Sequence
  Description of Artificial Sequence: Synthetic oligonucleotide
ugaauaccaaugcugaacuuuuuaa

SEQ ID NO: 2369 - RNA, 25 nt, Artificial Sequence
  Description of Artificial Sequence: Synthetic oligonucleotide
accagucagauauuguugcucaucu

SEQ ID NO: 2370 - RNA, 25 nt, Artificial Sequence
  Description of Artificial Sequence: Synthetic oligonucleotide
uccuuucuucaucuucaucugucau

SEQ ID NO: 2371 - RNA, 25 nt, Artificial Sequence
  Description of Artificial Sequence: Synthetic oligonucleotide
uugaugcacugcaguacaaauuaga

SEQ ID NO: 2372 - RNA, 25 nt, Artificial Sequence
  Description of Artificial Sequence: Synthetic oligonucleotide
agggcaccacaagauugacaagaaa

SEQ ID NO: 2373 - RNA, 25 nt, Artificial Sequence
  Description of Artificial Sequence: Synthetic oligonucleotide
aaaggggauugaaguuagccacagc

SEQ ID NO: 2374 - RNA, 25 nt, Artificial Sequence
  Description of Artificial Sequence: Synthetic oligonucleotide
cucugucucugagcaacaaauuugu

SEQ ID NO: 2375 - RNA, 25 nt, Artificial Sequence
  Description of Artificial Sequence: Synthetic oligonucleotide
uggaggguagucauaacaguacugu

SEQ ID NO: 2376 - RNA, 25 nt, Artificial Sequence
  Description of Artificial Sequence: Synthetic oligonucleotide
ugagcuuaaccacgaaaaauaugga

SEQ ID NO: 2377 - RNA, 25 nt, Artificial Sequence
  Description of Artificial Sequence: Synthetic oligonucleotide
aagugucaguggcaacaaccacaaa

SEQ ID NO: 2378 - RNA, 25 nt, Artificial Sequence
  Description of Artificial Sequence: Synthetic oligonucleotide
aagcccaaauuccaauuuugagaau

SEQ ID NO: 2379 - RNA, 25 nt, Artificial Sequence
  Description of Artificial Sequence: Synthetic oligonucleotide
ugaauuucaagcaagaacuuaaugg

SEQ ID NO: 2380 - RNA, 25 nt, Artificial Sequence
  Description of Artificial Sequence: Synthetic oligonucleotide
gaaauaccaagucaaaaccuacugu

SEQ ID NO: 2381 - RNA, 25 nt, Artificial Sequence
  Description of Artificial Sequence: Synthetic oligonucleotide
ucucuuccuccauggaauuuaagua

SEQ ID NO: 2382 - RNA, 25 nt, Artificial Sequence
  Description of Artificial Sequence: Synthetic oligonucleotide
augauuucaauucuucaaugcugua

SEQ ID NO: 2383 - RNA, 25 nt, Artificial Sequence
  Description of Artificial Sequence: Synthetic oligonucleotide
acucuaccgcuaaaggagcaguuga

SEQ ID NO: 2384 - RNA, 25 nt, Artificial Sequence
  Description of Artificial Sequence: Synthetic oligonucleotide
accacaagcuuagcuuggaaagccu

SEQ ID NO: 2385 - RNA, 25 nt, Artificial Sequence
  Description of Artificial Sequence: Synthetic oligonucleotide
ucaccucuuacuuuuccauugaguc

SEQ ID NO: 2386 - RNA, 25 nt, Artificial Sequence
  Description of Artificial Sequence: Synthetic oligonucleotide
caucuaccaaaggagaugucaaggg

SEQ ID NO: 2387 - RNA, 25 nt, Artificial Sequence
  Description of Artificial Sequence: Synthetic oligonucleotide
guucgguucuuucucgggaauauuc

SEQ ID NO: 2388 - RNA, 25 nt, Artificial Sequence
  Description of Artificial Sequence: Synthetic oligonucleotide
caggaacuauugcuagugaggccaa

SEQ ID NO: 2389 - RNA, 25 nt, Artificial Sequence
  Description of Artificial Sequence: Synthetic oligonucleotide
acacuuacuugaauuccaagagcac

SEQ ID NO: 2390 - RNA, 25 nt, Artificial Sequence
  Description of Artificial Sequence: Synthetic oligonucleotide
cacggucuucagugaagcugcaggg

SEQ ID NO: 2391 - RNA, 25 nt, Artificial Sequence
  Description of Artificial Sequence: Synthetic oligonucleotide
gcacuuccaaaauugaugauaucug

SEQ ID NO: 2392 - RNA, 25 nt, Artificial Sequence
  Description of Artificial Sequence: Synthetic oligonucleotide
ggaaccuugaaguaaaagaaaauuu

SEQ ID NO: 2393 - RNA, 25 nt, Artificial Sequence
  Description of Artificial Sequence: Synthetic oligonucleotide
uugcuggagaagccacacuccaacg

SEQ ID NO: 2394 - RNA, 25 nt, Artificial Sequence
  Description of Artificial Sequence: Synthetic oligonucleotide
gcauauauucccucugggagcacag

SEQ ID NO: 2395 - RNA, 25 nt, Artificial Sequence
  Description of Artificial Sequence: Synthetic oligonucleotide
guacgaaaaaccacuuacagcuaga

SEQ ID NO: 2396 - RNA, 25 nt, Artificial Sequence
  Description of Artificial Sequence: Synthetic oligonucleotide
agggccucuuuuucaccaacggaga

SEQ ID NO: 2397 - RNA, 25 nt, Artificial Sequence
  Description of Artificial Sequence: Synthetic oligonucleotide
aacauacaagcaaagccacccugga

SEQ ID NO: 2398 - RNA, 25 nt, Artificial Sequence
  Description of Artificial Sequence: Synthetic oligonucleotide
aacucucuccauggcaaaugucagc

SEQ ID NO: 2399 - RNA, 25 nt, Artificial Sequence
  Description of Artificial Sequence: Synthetic oligonucleotide
cucuuguucagguccaugcaaguca

SEQ ID NO: 2400 - RNA, 25 nt, Artificial Sequence
  Description of Artificial Sequence: Synthetic oligonucleotide
agcccaguuccuuccaugauuuccc

SEQ ID NO: 2401 - RNA, 25 nt, Artificial Sequence
  Description of Artificial Sequence: Synthetic oligonucleotide
cugaccuuggccaggaaguggcccu

SEQ ID NO: 2402 - RNA, 25 nt, Artificial Sequence
  Description of Artificial Sequence: Synthetic oligonucleotide
ugaaugcuaacacuaagaaccagaa

SEQ ID NO: 2403 - RNA, 25 nt, Artificial Sequence
  Description of Artificial Sequence: Synthetic oligonucleotide
agaucagauggaaaaaugaaguccg

SEQ ID NO: 2404 - RNA, 25 nt, Artificial Sequence
  Description of Artificial Sequence: Synthetic oligonucleotide
ggauucauucugggucuuuccagag

SEQ ID NO: 2405 - RNA, 25 nt, Artificial Sequence
  Description of Artificial Sequence: Synthetic oligonucleotide
gccaggucgagcuuuccaaugacca

SEQ ID NO: 2406 - RNA, 25 nt, Artificial Sequence
  Description of Artificial Sequence: Synthetic oligonucleotide
aagaaaaggcacaccuugacauugc

SEQ ID NO: 2407 - RNA, 25 nt, Artificial Sequence
  Description of Artificial Sequence: Synthetic oligonucleotide
caggauccuuagaaggacaccuaag

SEQ ID NO: 2408 - RNA, 25 nt, Artificial Sequence
  Description of Artificial Sequence: Synthetic oligonucleotide
gguuccucaaaaauaucauccuacc

SEQ ID NO: 2409 - RNA, 25 nt, Artificial Sequence
  Description of Artificial Sequence: Synthetic oligonucleotide
cagucuaugacaagagcuuauggga

SEQ ID NO: 2410 - RNA, 25 nt, Artificial Sequence
  Description of Artificial Sequence: Synthetic oligonucleotide
auuuccuaaagcuggauguaaccac

SEQ ID NO: 2411 - RNA, 25 nt, Artificial Sequence
  Description of Artificial Sequence: Synthetic oligonucleotide
ccagcauugguaggagacagcaucu

SEQ ID NO: 2412 - RNA, 25 nt, Artificial Sequence
  Description of Artificial Sequence: Synthetic oligonucleotide
uucguguuucaacugccuuugugua

SEQ ID NO: 2413 - RNA, 25 nt, Artificial Sequence
  Description of Artificial Sequence: Synthetic oligonucleotide
acaccaaaaaccccaauggcuauuc

SEQ ID NO: 2414 - RNA, 25 nt, Artificial Sequence
  Description of Artificial Sequence: Synthetic oligonucleotide
cauucuccaucccuguaaaaguuuu

SEQ ID NO: 2415 - RNA, 25 nt, Artificial Sequence
  Description of Artificial Sequence: Synthetic oligonucleotide
uggcugauaaauucauuauuccugg

SEQ ID NO: 2416 - RNA, 25 nt, Artificial Sequence
  Description of Artificial Sequence: Synthetic oligonucleotide
ggcugaaacuaaaugaucuaaauuc

SEQ ID NO: 2417 - RNA, 25 nt, Artificial Sequence
  Description of Artificial Sequence: Synthetic oligonucleotide
caguucuugucaugccuacguucca

SEQ ID NO: 2418 - RNA, 25 nt, Artificial Sequence
  Description of Artificial Sequence: Synthetic oligonucleotide
augucccauuuacagaucuucaggu

SEQ ID NO: 2419 - RNA, 25 nt, Artificial Sequence
  Description of Artificial Sequence: Synthetic oligonucleotide
uuccaucgugcaaacuugacuucag

SEQ ID NO: 2420 - RNA, 25 nt, Artificial Sequence
  Description of Artificial Sequence: Synthetic oligonucleotide
gagaaauacaaaucuauaagaagcu

SEQ ID NO: 2421 - RNA, 25 nt, Artificial Sequence
  Description of Artificial Sequence: Synthetic oligonucleotide
ugagaacuucaucauuugcccucaa

SEQ ID NO: 2422 - RNA, 25 nt, Artificial Sequence
  Description of Artificial Sequence: Synthetic oligonucleotide
accuaccaacacuccccgagguaaa

SEQ ID NO: 2423 - RNA, 25 nt, Artificial Sequence
  Description of Artificial Sequence: Synthetic oligonucleotide
aauucccugaaguugauguguuaac

SEQ ID NO: 2424 - RNA, 25 nt, Artificial Sequence
  Description of Artificial Sequence: Synthetic oligonucleotide
caaaauauucucaaccagaagacuc

SEQ ID NO: 2425 - RNA, 25 nt, Artificial Sequence
  Description of Artificial Sequence: Synthetic oligonucleotide
ccuugauucccuuuuuugagauaac

SEQ ID NO: 2426 - RNA, 25 nt, Artificial Sequence
  Description of Artificial Sequence: Synthetic oligonucleotide
ccgugccugaaucucaguuaacugu

SEQ ID NO: 2427 - RNA, 25 nt, Artificial Sequence
  Description of Artificial Sequence: Synthetic oligonucleotide
ugucccaguucacgcuuccaaaaag

SEQ ID NO: 2428 - RNA, 25 nt, Artificial Sequence
  Description of Artificial Sequence: Synthetic oligonucleotide
guguuucagauggcauugcugcuuu

SEQ ID NO: 2429 - RNA, 25 nt, Artificial Sequence
  Description of Artificial Sequence: Synthetic oligonucleotide
uggaucuaaaugcaguagccaacaa

SEQ ID NO: 2430 - RNA, 25 nt, Artificial Sequence
  Description of Artificial Sequence: Synthetic oligonucleotide
agaucgcagacuuugaguugcccac

SEQ ID NO: 2431 - RNA, 25 nt, Artificial Sequence
  Description of Artificial Sequence: Synthetic oligonucleotide
ccaucaucgugccugagcagaccau

SEQ ID NO: 2432 - RNA, 25 nt, Artificial Sequence
  Description of Artificial Sequence: Synthetic oligonucleotide
uugagauucccuccauuaaguucuc

SEQ ID NO: 2433 - RNA, 25 nt, Artificial Sequence
  Description of Artificial Sequence: Synthetic oligonucleotide
cuguaccugcuggaauugucauucc

SEQ ID NO: 2434 - RNA, 25 nt, Artificial Sequence
  Description of Artificial Sequence: Synthetic oligonucleotide
cuuccuuucaagcacugacugcacg

SEQ ID NO: 2435 - RNA, 25 nt, Artificial Sequence
  Description of Artificial Sequence: Synthetic oligonucleotide
gcuuugagguagacucucccgugua

SEQ ID NO: 2436 - RNA, 25 nt, Artificial Sequence
  Description of Artificial Sequence: Synthetic oligonucleotide
auaaugccacuuggagugccaguuu

SEQ ID NO: 2437 - RNA, 25 nt, Artificial Sequence
  Description of Artificial Sequence: Synthetic oligonucleotide
ugaaaaacaaagcagauuauguuga

SEQ ID NO: 2438 - RNA, 25 nt, Artificial Sequence
  Description of Artificial Sequence: Synthetic oligonucleotide
aaacaguccuggauuccacaugcag

SEQ ID NO: 2439 - RNA, 25 nt, Artificial Sequence
  Description of Artificial Sequence: Synthetic oligonucleotide
gcucaaccguacaguuccuagaaua

SEQ ID NO: 2440 - RNA, 25 nt, Artificial Sequence
  Description of Artificial Sequence: Synthetic oligonucleotide
augaacuaaauguuuugggaacaca

SEQ ID NO: 2441 - RNA, 25 nt, Artificial Sequence
  Description of Artificial Sequence: Synthetic oligonucleotide
acaaaaucgaagaugguacguuagc

SEQ ID NO: 2442 - RNA, 25 nt, Artificial Sequence
  Description of Artificial Sequence: Synthetic oligonucleotide
ccucuaagacuaaaggaacauuugc

SEQ ID NO: 2443 - RNA, 25 nt, Artificial Sequence
  Description of Artificial Sequence: Synthetic oligonucleotide
cacaccgugacuucagugcagaaua

SEQ ID NO: 2444 - RNA, 25 nt, Artificial Sequence
  Description of Artificial Sequence: Synthetic oligonucleotide
augaagaagauggcaaauaugaagg

SEQ ID NO: 2445 - RNA, 25 nt, Artificial Sequence
  Description of Artificial Sequence: Synthetic oligonucleotide
gacuucaggaaugggaaggaaaagc

SEQ ID NO: 2446 - RNA, 25 nt, Artificial Sequence
  Description of Artificial Sequence: Synthetic oligonucleotide
cgcaccucaauaucaaaagcccagc

SEQ ID NO: 2447 - RNA, 25 nt, Artificial Sequence
  Description of Artificial Sequence: Synthetic oligonucleotide
cguucaccgaucuccaucugcgcua

SEQ ID NO: 2448 - RNA, 25 nt, Artificial Sequence
  Description of Artificial Sequence: Synthetic oligonucleotide
accagaaagacaagaaaggcaucuc

SEQ ID NO: 2449 - RNA, 25 nt, Artificial Sequence
  Description of Artificial Sequence: Synthetic oligonucleotide
ccaccucagcagccuccccagccgu

SEQ ID NO: 2450 - RNA, 25 nt, Artificial Sequence
  Description of Artificial Sequence: Synthetic oligonucleotide
uaggcaccgugggcauggauaugga

SEQ ID NO: 2451 - RNA, 25 nt, Artificial Sequence
  Description of Artificial Sequence: Synthetic oligonucleotide
augaagaugacgacuuuucuaaaug

SEQ ID NO: 2452 - RNA, 25 nt, Artificial Sequence
  Description of Artificial Sequence: Synthetic oligonucleotide
ggaacuucuacuacagcccucaguc

SEQ ID NO: 2453 - RNA, 25 nt, Artificial Sequence
  Description of Artificial Sequence: Synthetic oligonucleotide
ccucuccagauaaaaaacucaccau

SEQ ID NO: 2454 - RNA, 25 nt, Artificial Sequence
  Description of Artificial Sequence: Synthetic oligonucleotide
uauucaaaacugaguugaggguccg

SEQ ID NO: 2455 - RNA, 25 nt, Artificial Sequence
  Description of Artificial Sequence: Synthetic oligonucleotide
gggaaucugaugaggaaacucagau

SEQ ID NO: 2456 - RNA, 25 nt, Artificial Sequence
  Description of Artificial Sequence: Synthetic oligonucleotide
ucaaaguuaauugggaagaagaggc

SEQ ID NO: 2457 - RNA, 25 nt, Artificial Sequence
  Description of Artificial Sequence: Synthetic oligonucleotide
cagcuucuggcuugcuaaccucucu

SEQ ID NO: 2458 - RNA, 25 nt, Artificial Sequence
  Description of Artificial Sequence: Synthetic oligonucleotide
ugaaagacaacgugcccaaggccac

SEQ ID NO: 2459 - RNA, 25 nt, Artificial Sequence
  Description of Artificial Sequence: Synthetic oligonucleotide
cagggguccuuuaugauuaugucaa

SEQ ID NO: 2460 - RNA, 25 nt, Artificial Sequence
  Description of Artificial Sequence: Synthetic oligonucleotide
acaaguaccacugggaacacacagg

SEQ ID NO: 2461 - RNA, 25 nt, Artificial Sequence
  Description of Artificial Sequence: Synthetic oligonucleotide
ggcucacccugagagaagugucuuc

SEQ ID NO: 2462 - RNA, 25 nt, Artificial Sequence
  Description of Artificial Sequence: Synthetic oligonucleotide
caaagcugagaagaaaucugcagaa

SEQ ID NO: 2463 - RNA, 25 nt, Artificial Sequence
  Description of Artificial Sequence: Synthetic oligonucleotide
acaaugcugaguggguuuaucaagg

SEQ ID NO: 2464 - RNA, 25 nt, Artificial Sequence
  Description of Artificial Sequence: Synthetic oligonucleotide
gggccauuaggcaaauugaugauau

SEQ ID NO: 2465 - RNA, 25 nt, Artificial Sequence
  Description of Artificial Sequence: Synthetic oligonucleotide
ucgacgugagguuccagaaagcagc

SEQ ID NO: 2466 - RNA, 25 nt, Artificial Sequence
  Description of Artificial Sequence: Synthetic oligonucleotide
ccaguggcaccacugggaccuacca

SEQ ID NO: 2467 - RNA, 25 nt, Artificial Sequence
  Description of Artificial Sequence: Synthetic oligonucleotide
aagaguggaaggacaaggcccagaa

SEQ ID NO: 2468 - RNA, 25 nt, Artificial Sequence
  Description of Artificial Sequence: Synthetic oligonucleotide
aucuguaccaggaacuguugacuca

SEQ ID NO: 2469 - RNA, 25 nt, Artificial Sequence
  Description of Artificial Sequence: Synthetic oligonucleotide
aggaaggccaagccaguuuccaggg

SEQ ID NO: 2470 - RNA, 25 nt, Artificial Sequence
  Description of Artificial Sequence: Synthetic oligonucleotide
gacucaaggauaacguguuugaugg

SEQ ID NO: 2471 - RNA, 25 nt, Artificial Sequence
  Description of Artificial Sequence: Synthetic oligonucleotide
gcuugguacgaguuacucaagaauu

SEQ ID NO: 2472 - RNA, 25 nt, Artificial Sequence
  Description of Artificial Sequence: Synthetic oligonucleotide
uccauaugaaagucaagcaucugau

SEQ ID NO: 2473 - RNA, 25 nt, Artificial Sequence
  Description of Artificial Sequence: Synthetic oligonucleotide
uugacucacucauugauuuucugaa

SEQ ID NO: 2474 - RNA, 25 nt, Artificial Sequence
  Description of Artificial Sequence: Synthetic oligonucleotide
acuuccccagauuccaguuuccggg

SEQ ID NO: 2475 - RNA, 25 nt, Artificial Sequence
  Description of Artificial Sequence: Synthetic oligonucleotide
ggaaaccugggauauacacuaggga

SEQ ID NO: 2476 - RNA, 25 nt, Artificial Sequence
  Description of Artificial Sequence: Synthetic oligonucleotide
aggaacuuugcacuauguucauaag

SEQ ID NO: 2477 - RNA, 25 nt, Artificial Sequence
  Description of Artificial Sequence: Synthetic oligonucleotide
gggagguagggacgguacuguccca

SEQ ID NO: 2478 - RNA, 25 nt, Artificial Sequence
  Description of Artificial Sequence: Synthetic oligonucleotide
agguauauucgaaaguccauaaugg

SEQ ID NO: 2479 - RNA, 25 nt, Artificial Sequence
  Description of Artificial Sequence: Synthetic oligonucleotide
guucagaaauacuguuuuccuauuu

SEQ ID NO: 2480 - RNA, 25 nt, Artificial Sequence
  Description of Artificial Sequence: Synthetic oligonucleotide
uccaagaccuagugauuacacuucc

SEQ ID NO: 2481 - RNA, 25 nt, Artificial Sequence
  Description of Artificial Sequence: Synthetic oligonucleotide
cuuucgaguuaaggaaacauaaacu

SEQ ID NO: 2482 - RNA, 25 nt, Artificial Sequence
  Description of Artificial Sequence: Synthetic oligonucleotide
uaauagauguaaucucgauguauag

SEQ ID NO: 2483 - RNA, 25 nt, Artificial Sequence
  Description of Artificial Sequence: Synthetic oligonucleotide
gggaacuguugaaagauuuaucaaa

SEQ ID NO: 2484 - RNA, 25 nt, Artificial Sequence
  Description of Artificial Sequence: Synthetic oligonucleotide
aagaagcccaagagguauuuaaagc

SEQ ID NO: 2485 - RNA, 25 nt, Artificial Sequence
  Description of Artificial Sequence: Synthetic oligonucleotide
ccauucagucucucaagaccacaga

SEQ ID NO: 2486 - RNA, 25 nt, Artificial Sequence
  Description of Artificial Sequence: Synthetic oligonucleotide
aggugcuacguaaucuucaggaccu

SEQ ID NO: 2487 - RNA, 25 nt, Artificial Sequence
  Description of Artificial Sequence: Synthetic oligonucleotide
uuuuacaauucauuuuccaacuaau

SEQ ID NO: 2488 - RNA, 25 nt, Artificial Sequence
  Description of Artificial Sequence: Synthetic oligonucleotide
uagaagauaacauuaaacagcugaa

SEQ ID NO: 2489 - RNA, 25 nt, Artificial Sequence
  Description of Artificial Sequence: Synthetic oligonucleotide
aagagaugaaauuuacuuaucuuau

SEQ ID NO: 2490 - RNA, 25 nt, Artificial Sequence
  Description of Artificial Sequence: Synthetic oligonucleotide
uuaauuauauccaagaugagaucaa

SEQ ID NO: 2491 - RNA, 25 nt, Artificial Sequence
  Description of Artificial Sequence: Synthetic oligonucleotide
acacaaucuucagugauuauauccc

SEQ ID NO: 2492 - RNA, 25 nt, Artificial Sequence
  Description of Artificial Sequence: Synthetic oligonucleotide
cauauguuuuuaaauuguugaaaga

SEQ ID NO: 2493 - RNA, 25 nt, Artificial Sequence
  Description of Artificial Sequence: Synthetic oligonucleotide
aaaaccuaugccuuaaucuucauaa

SEQ ID NO: 2494 - RNA, 25 nt, Artificial Sequence
  Description of Artificial Sequence: Synthetic oligonucleotide
aguucaaugaauuuauucaaaacga

SEQ ID NO: 2495 - RNA, 25 nt, Artificial Sequence
  Description of Artificial Sequence: Synthetic oligonucleotide
agcuucaggaagcuucucaagaguu

SEQ ID NO: 2496 - RNA, 25 nt, Artificial Sequence
  Description of Artificial Sequence: Synthetic oligonucleotide
uacagcagauccaucaauacauuau

SEQ ID NO: 2497 - RNA, 25 nt, Artificial Sequence
  Description of Artificial Sequence: Synthetic oligonucleotide
uggcccuucgugaagaauauuuuga

SEQ ID NO: 2498 - RNA, 25 nt, Artificial Sequence
  Description of Artificial Sequence: Synthetic oligonucleotide
auccaaguauaguuggcuggacagu

SEQ ID NO: 2499 - RNA, 25 nt, Artificial Sequence
  Description of Artificial Sequence: Synthetic oligonucleotide
ugaaauauuaugaacuugaagaaaa

SEQ ID NO: 2500 - RNA, 25 nt, Artificial Sequence
  Description of Artificial Sequence: Synthetic oligonucleotide
agauagucagucugaucaagaaccu

SEQ ID NO: 2501 - RNA, 25 nt, Artificial Sequence
  Description of Artificial Sequence: Synthetic oligonucleotide
uguuaguugcucuuaaggacuucca

SEQ ID NO: 2502 - RNA, 25 nt, Artificial Sequence
  Description of Artificial Sequence: Synthetic oligonucleotide
auucugaauauauugucagugccuc

SEQ ID NO: 2503 - RNA, 25 nt, Artificial Sequence
  Description of Artificial Sequence: Synthetic oligonucleotide
cuaacuuuacuucccaacucucaag

SEQ ID NO: 2504 - RNA, 25 nt, Artificial Sequence
  Description of Artificial Sequence: Synthetic oligonucleotide
gucaaguugagcaauuucugcacag

SEQ ID NO: 2505 - RNA, 25 nt, Artificial Sequence
  Description of Artificial Sequence: Synthetic oligonucleotide
gaaauauucaggaauaucuuagcau

SEQ ID NO: 2506 - RNA, 25 nt, Artificial Sequence
  Description of Artificial Sequence: Synthetic oligonucleotide
uccuuaccgauccagauggaaaagg

SEQ ID NO: 2507 - RNA, 25 nt, Artificial Sequence
  Description of Artificial Sequence: Synthetic oligonucleotide
ggaaagagaagauugcagagcuuuc

SEQ ID NO: 2508 - RNA, 25 nt, Artificial Sequence
  Description of Artificial Sequence: Synthetic oligonucleotide
cugccacugcucaggaaauaauuaa

SEQ ID NO: 2509 - RNA, 25 nt, Artificial Sequence
  Description of Artificial Sequence: Synthetic oligonucleotide
aaagccaggccauugcgacgaagaa

SEQ ID NO: 2510 - RNA, 25 nt, Artificial Sequence
  Description of Artificial Sequence: Synthetic oligonucleotide
aaauaauuucugauuaccaccagca

SEQ ID NO: 2511 - RNA, 25 nt, Artificial Sequence
  Description of Artificial Sequence: Synthetic oligonucleotide
aguuuagauauaaacugcaagauuu

SEQ ID NO: 2512 - RNA, 25 nt, Artificial Sequence
  Description of Artificial Sequence: Synthetic oligonucleotide
uuucagaccaacucucugauuacua

SEQ ID NO: 2513 - RNA, 25 nt, Artificial Sequence
  Description of Artificial Sequence: Synthetic oligonucleotide
augaaaaauuuauugcugaauccaa

SEQ ID NO: 2514 - RNA, 25 nt, Artificial Sequence
  Description of Artificial Sequence: Synthetic oligonucleotide
aaagauugauugaccuguccauuca

SEQ ID NO: 2515 - RNA, 25 nt, Artificial Sequence
  Description of Artificial Sequence: Synthetic oligonucleotide
aaaacuaccacacauuucugauaua

SEQ ID NO: 2516 - RNA, 25 nt, Artificial Sequence
  Description of Artificial Sequence: Synthetic oligonucleotide
acaucacggaguuacugaaaaagcu

SEQ ID NO: 2517 - RNA, 25 nt, Artificial Sequence
  Description of Artificial Sequence: Synthetic oligonucleotide
ugcaaucaaccacagucaugaaccc

SEQ ID NO: 2518 - RNA, 25 nt, Artificial Sequence
  Description of Artificial Sequence: Synthetic oligonucleotide
ccuacaugaagcuugcuccaggaga

SEQ ID NO: 2519 - RNA, 25 nt, Artificial Sequence
  Description of Artificial Sequence: Synthetic oligonucleotide
aacuuacuaucauccucuaauuuuu

SEQ ID NO: 2520 - RNA, 25 nt, Artificial Sequence
  Description of Artificial Sequence: Synthetic oligonucleotide
uuaaaagaaaucuucauuuauucuu

SEQ ID NO: 2521 - RNA, 25 nt, Artificial Sequence
  Description of Artificial Sequence: Synthetic oligonucleotide
ucuuuuccaauugaacuuucacaua

SEQ ID NO: 2522 - RNA, 25 nt, Artificial Sequence
  Description of Artificial Sequence: Synthetic oligonucleotide
agcacagaaaaaauucaaacugccu

SEQ ID NO: 2523 - RNA, 25 nt, Artificial Sequence
  Description of Artificial Sequence: Synthetic oligonucleotide
uauauugauaaaaccauacagugag

SEQ ID NO: 2524 - RNA, 25 nt, Artificial Sequence
  Description of Artificial Sequence: Synthetic oligonucleotide
gccagccuugcaguaggcaguagac

SEQ ID NO: 2525 - RNA, 25 nt, Artificial Sequence
  Description of Artificial Sequence: Synthetic oligonucleotide
cuauaagcagaagcacauaugaacu

SEQ ID NO: 2526 - RNA, 25 nt, Artificial Sequence
  Description of Artificial Sequence: Synthetic oligonucleotide
uggaccugcaccaaagcuggcacca

SEQ ID NO: 2527 - RNA, 25 nt, Artificial Sequence
  Description of Artificial Sequence: Synthetic oligonucleotide
agggcucggaaggucucugaacuca

SEQ ID NO: 2528 - RNA, 25 nt, Artificial Sequence
  Description of Artificial Sequence: Synthetic oligonucleotide
agaaggauggcauuuuuugcaaguu

SEQ ID NO: 2529 - RNA, 25 nt, Artificial Sequence
  Description of Artificial Sequence: Synthetic oligonucleotide
uaaagaaaaucaggaucugaguuau

SEQ ID NO: 2530 - RNA, 25 nt, Artificial Sequence
  Description of Artificial Sequence: Synthetic oligonucleotide
uuuugcuaaacuugggggaggagga

SEQ ID NO: 2531 - RNA, 25 nt, Artificial Sequence
  Description of Artificial Sequence: Synthetic oligonucleotide
aacaaauaaauggagucuuuauugu

SEQ ID NO: 2532 - RNA, 25 nt, Artificial Sequence
  Description of Artificial Sequence: Synthetic oligonucleotide
aauggagucuuuauuguguaucaua

What is claimed is:

1. A meroduplex ribonucleic acid (mdRNA) molecule, comprising a first strand of 15 to 40 nucleotides in length that is complementary to an apolipoprotein B (ApoB) mRNA as set forth in SEQ ID NO:1158, and a second strand and a third strand that are each complementary to non-overlapping regions of the first strand, wherein the second strand and third strands can anneal with the first strand to form at least two double-stranded regions spaced apart by up to 10 nucleotides and thereby forming a gap between the second and third strands.

2. The mdRNA molecule of claim 1 wherein the first strand is 15 to 25 nucleotides in length or 26 to 40 nucleotides in length.

3. The mdRNA molecule of claim 1 wherein the gap is a nick or the gap comprises at least one unpaired nucleotide in the first strand positioned between the double-stranded regions formed by the second and third strands when annealed to the first strand.

4. The mdRNA molecule of claim 1 wherein at least one uridine of the mdRNA molecule is a 5-methyluridine, 2-thioribothymidine, or 2′-O-methyl-5-methyuridine.

5. The mdRNA molecule of claim 1 wherein the mdRNA molecule comprises at least one locked nucleic acid (LNA) molecule, deoxy nucleotide, G clamp, 2′-sugar modification, modified internucleoside linkage, or any combination thereof.

6. The mdRNA molecule of claim 1 wherein the mdRNA molecule contains at least one 3′-overhang comprising one to four nucleotides that are not part of the gap or wherein the mdRNA has a blunt end at one or both ends of the mdRNA.

7. The mdRNA molecule of claim 1, wherein the third strand comprises a 5′-terminal end comprising a hydroxyl or a phosphate.

8. An mdRNA molecule, comprising a first strand of 15 to 40 nucleotides in length that is complementary to a human ApoB mRNA as set forth in SEQ ID NO:1158, and a second strand and a third strand that is each complementary to non-overlapping regions of the first strand, wherein the second strand and third strands can anneal with the first strand to form at least two double-stranded regions spaced apart by up to 10 nucleotides and thereby forming a gap between the second and third strands, and wherein at least one pyrimidine of the mdRNA comprises a pyrimidine nucleoside according to Formula I or II: [chemical structure]
wherein:
R¹ and R² are each independently a —H, —OH, —OCH₃, —OCH₂OCH₂CH₃, —OCH₂CH₂OCH₃, halogen, substituted or unsubstituted C₁-C₁₀ alkyl, alkoxy, alkoxyalkyl, hydroxyalkyl, carboxyalkyl, alkylsulfonylamino, aminoalkyl, dialkylamino, alkylaminoalkyl, dialkylaminoalkyl, haloalkyl, trifluoromethyl, cycloalkyl, (cycloalkyl)alkyl, substituted or unsubstituted C₂-C₁₀ alkenyl, substituted or unsubstituted —O-allyl, —O—CH₂CH═CH₂, —O—CH═CHCH₃, substituted or unsubstituted C₂-C₁₀ alkynyl, carbamoyl, carbamyl, carboxy, carbonylamino, substituted or unsubstituted aryl, substituted or unsubstituted aralkyl, —NH₂, —NO₂, —C≡N, or heterocyclo group,
R³ and R⁴ are each independently a hydroxyl, a protected hydroxyl, a phosphate, or an internucleoside linking group, and
R⁵ and R⁸ are each independently O or S.

9. The mdRNA molecule of claim 8 wherein the first strand is 15 to 25 nucleotides in length or 26 to 40 nucleotides in length.

10. The mdRNA molecule of claim 8 wherein the gap is a nick or the gap comprises at least one unpaired nucleotide in the first strand positioned between the double-stranded regions formed by the second and third strands when annealed to the first strand.

11. The mdRNA molecule of claim 8 wherein at least one nucleoside is according to Formula I and in which R¹ is methyl and R² is —OH or —O-methyl.

12. The mdRNA molecule of claim 8 wherein at least one R² is selected from the group consisting of 2′-O—(C₁-C₅) alkyl, 2′-O-methyl, 2′-OCH₂OCH₂CH₃, 2′-OCH₂CH₂OCH₃, 2′-O-allyl, and 2′-fluoro.

13. The mdRNA molecule of claim 8 wherein at least one uridine of the mdRNA molecule is a 5-methyluridine, 2-thioribothymidine, or 2′-O-methyl-5-methyuridine.

14. The mdRNA molecule of claim 8 the mdRNA molecule comprises at least one locked nucleic acid (LNA) molecule, deoxy nucleotide, G clamp, 2′-sugar modification, modified internucleoside linkage, or any combination thereof.

15. The mdRNA molecule of claim 8, wherein the mdRNA contains at least one 3′-overhang comprising one to four nucleotides that is not a part of the gap or wherein the mdRNA molecule has a blunt end on one or both ends of the mdRNA molecule.

16. An mdRNA molecule, comprising a first strand that is complementary to a human ApoB mRNA as set forth in SEQ ID NO:1158, and a second strand and a third strand that are each complementary to non-overlapping regions of the first strand, wherein the second strand and third strands can anneal with the first strand to form at least two double-stranded regions spaced apart by up to 10 nucleotides and thereby forming a gap between the second and third strands, and wherein the combined double-stranded regions total about 15 base pairs to about 40 base pairs.

17. The mdRNA molecule of claim 16 wherein the first strand is 15 to 25 nucleotides in length or 26 to 40 nucleotides in length.

18. The mdRNA molecule of claim 16 wherein the gap is a nick or the gap comprises at least one unpaired nucleotide in the first strand positioned between the double-stranded regions formed by the second and third strands when annealed to the first strand.

19. The mdRNA molecule of claim 16 wherein at least one uridine of the mdRNA molecule is a 5-methyluridine, 2-thioribothymidine, or 2′-O-methyl-5-methyuridine.

20. The mdRNA molecule of claim 1 wherein the first strand is 19 to 23 nucleotides in length and is complementary to a human ApoB nucleic acid sequence as set forth in any one of SEQ ID NOS:1159-1943.

21. The mdRNA molecule of claim 1 wherein the first strand is 25 to 29 nucleotides in length and is complementary to a human ApoB nucleic acid sequence as set forth in any one of SEQ ID NOS:1944-2532.

22. A method for reducing the expression of a human ApoB gene, comprising administering an mdRNA molecule according to claim 1 to a cell expressing an ApoB gene, wherein the mdRNA molecule reduces expression of the ApoB gene in the cell.

23. The method according to claim 22 wherein the cell is human.
